(19) United States
(12) Patent Application Publication
(10) Pub. No.: US 2004/0018976 A1
(43) Pub. Date: Jan. 29, 2004

(54) Polynucleotide encoding novel human G-protein coupled receptors, and splice variants thereof

(76) Inventors: John N. Feder, Belle Mead, NJ (US); Gabriel Mintier, Hightstown, NJ (US); Chandra S. Ramanathan, Wallingford, CT (US)

Correspondence Address: STEPHEN B. DAVIS, BRISTOL-MYERS SQUIBB COMPANY, PATENT DEPARTMENT, P O BOX 4000, PRINCETON, NJ, 08543-4000, US

(21) Appl. No.: 10/436,715

(22) Filed: May 13, 2003

Related U.S. Application Data
(60) Provisional application No. 60/380,336, filed on May 14, 2002.

(51) Int. Cl. A61K 38/17; C07K 14/705; C12P 21/02; C12N 5/06; C07K 16/28; C07H 21/04

(52) U.S. Cl. 514/12; 530/350; 536/23.2; 530/388.22; 435/69.1; 435/320.1; 435/325

(57) ABSTRACT

The present invention provides novel polynucleotides encoding HGPRBMY30_1, HGPRBMY30_2, HGPRBMY30_3, HGPRBMY41_1, HGPRBMY41_2, HGPRBMY41_3, HGPRBMY42, HGPRBMY42_1, HGPRBMY43, and/or HGPRBMY44 polypeptides, fragments and homologues thereof. Also provided are vectors, host cells, antibodies, and recombinant and synthetic methods for producing said polypeptides. The invention further relates to diagnostic and therapeutic methods for applying these novel HGPRBMY30_1, HGPRBMY30_2, HGPRBMY30_3, HGPRBMY41_1, HGPRBMY41_2 HGPRBMY41_3, HGPRBMY42, HGPRBMY42_1, HGPRBMY43, and/or HGPRBMY44 polypeptides to the diagnosis, treatment, and/or prevention of various diseases and/or disorders related to these polypeptides. The invention further relates to screening methods for identifying agonists and antagonists of the polynucleotides and polypeptides of the present invention.

[0001] This application claims benefit to provisional application U.S. Serial No. 60/380,336 filed May 14, 2002, under 35 U.S.C. 119(e). The entire teachings of the referenced applications are incorporated herein by reference.

### FIELD OF THE INVENTION

[0002] The present invention provides novel polynucleotides encoding HGPRBMY30_{—}1, HGPRBMY30_{—}2, HGPRBMY30_{—}3, HGPRBMY41_{—}1, HGPRBMY4_{—}2, HGPRBMY41_{—}3, HGPRBMY42, HGPRBMY42_{—}1, HGPRBMY43, and/or HGPRBMY44 polypeptides, fragments and homologues thereof. Also provided are vectors, host cells, antibodies, and recombinant and synthetic methods for producing said polypeptides. The invention further relates to diagnostic and therapeutic methods for applying these novel HGPRBMY30_{—}1, HGPRBMY30_{—}2, HGPRBMY30_{—}3, HGPRBMY41_{—}1, HGPRBMY41_{—}2, HGPRBMY41_{—}3, HGPRBMY42, HGPRBMY42_{—}1, HGPRBMY43, and/or HGPRBMY44 polypeptides to the diagnosis, treatment, and/or prevention of various diseases and/or disorders related to these polypeptides. The invention further relates to screening methods for identifying agonists and antagonists of the polynucleotides and polypeptides of the present invention.

### BACKGROUND OF THE INVENTION

[0003] Regulation of cell proliferation, differentiation, and migration is important for the formation and function of tissues. Regulatory proteins such as growth factors control these cellular processes and act as mediators in cell-cell signaling pathways. Growth factors are secreted proteins that bind to specific cell surface receptors on target cells. The bound receptors trigger intracellular signal transduction pathways which activate various downstream effectors that regulate gene expression, cell division, cell differentiation, cell motility, and other cellular processes. Some of the receptors involved in signal transduction by growth factors belong to the large superfamily of G-protein coupled receptors (GPCRs) which represent one of the largest receptor superfamilies known.

[0004] GPCRs are biologically important as their malfunction has been implicated in contributing to the onset of many diseases, which include, but are not limited to, Alzheimer's, Parkinson, diabetes, dwarfism, color blindness, retinal pigmentosa and asthma. Also, GPCRs have also been implicated in depression, schizophrenia, sleeplessness, hypertension, anxiety, stress, renal failure and in several cardiovascular, metabolic, neuro, oncology and immune disorders (F Horn, G Vriend, J. Mol. Med. 76: 464-468, 1998.). They have also been shown to play a role in HIV infection (Y Feng, C C Broder, P E Kennedy, E A Berger, Science 272:872-877, 1996).

[0005] GPCRs are integral membrane proteins characterized by the presence of seven hydrophobic transmembrane domains which together form a bundle of antiparallel alpha (a) helices. The 7 transmembrane regions are designated as TM1, TM2, TM3, TM4, TM5, TM6, and TM7. These proteins range in size from under 400 to over 1000 amino acids (Strosberg, A. D. (1991) Eur. J. Biochem. 196: 110; Coughlin, S. R. (1994) Curr. Opin. Cell Biol. 6: 191-197). The amino-terminus of a GPCR is extracellular, is of variable length, and is often glycosylated. The carboxy-terminus is cytoplasmic and generally phosphorylated. Extracellular loops of GPCRs alternate with intracellular loops and link the transmembrane domains. Cysteine disulfide bridges linking the second and third extracellular loops may interact with agonists and antagonists. The most conserved domains of GPCRs are the transmembrane domains and the first two cytoplasmic loops. The transmembrane domains account for structural and functional features of the receptor. In most G-protein coupled receptors, the bundle of a helices forms a ligand-binding pocket formed by several G-protein coupled receptor transmembrane domains.

[0006] The TM3 transmembrane domain has been implicated in signal transduction in a number of G-protein coupled receptors. Phosphorylation and lipidation (palmitylation or farnesylation) of cysteine residues can influence signal transduction of some G-protein coupled receptors. Most G-protein coupled receptors contain potential phosphorylation sites within the third cytoplasmic loop and/or the carboxy terminus. For several G-protein coupled receptors, such as the b adrenoreceptor, phosphorylation by protein kinase A and/or specific receptor kinases mediates receptor desensitization. In fact, phosphorylation of an activated G-protein coupled receptor is a common mechanism for desensitizing signaling to a G-protein.

[0007] The extracellular N-terminal segment, or one or more of the three hydrophilic extracellular loops, have been postulated to face inward and form polar ligand binding sites which may participate in ligand binding. Ligand binding activates the receptor by inducing a conformational change in intracellular portions of the receptor. In turn, the large, third intracellular loop of the activated receptor interacts with an intracellular heterotrimeric guanine nucleotide binding (G) protein complex which mediates further intracellular signaling activities, including the activation of second messengers such as cyclic AMP (cAMP), phospholipase C, inositol triphosphate, or ion channel proteins. TM3 has been implicated in several G-protein coupled receptors as having a ligand binding site, such as the TM3 aspartate residue. TM5 serines, a TM6 asparagine and TM6 or TM7 phenylalanines or tyrosines have also been implicated in ligand binding (See, e. g., Watson, S. and S. Arkinstall (1994) The G-protein Linked Receptor Facts Book, Academic Press, San Diego Calif., pp. 2-6; Bolander, F. F. (1994) Molecular Endocrinology, Academic Press, San Diego Calif., pp. 162-176; Baldwin, J. M. (1994) Curr. Opin. Cell Biol. 6: 180-190; F Horn, R Bywater, G Krause, W Kuipers, L Oliveira, A C M Paiva, C Sander, G Vriend, Receptors and Channels, 5:305-314, 1998).

[0008] Recently, the function of many GPCRs has been shown to be enhanced upon dimerization and/or oligomerization of the activated receptor. In addition, sequestration of the activated GPCR appears to be altered upon the formation of multimeric complexes (AbdAlla, S., et al., Nature, 407:94-98 (2000)).

[0009] Structural biology has provided significant insight into the function of the various conserved residues found amongst numerous GPCRs. For example, the tripeptide Asp(Glu)-Arg-Tyr motif is important in maintaining the inactive confirmation of G-protein coupled receptors. The residues within this motif participate in the formation of several hydrogen bonds with surrounding amino acid residues that are important for maintaining the inactive state (Kim, J. M., et al., Proc. Natl. Acad. Sci. U.S.A., 94:14273-14278 (1997)). Another example relates to the conservation of two Leu (Leu76 and Leu79) residues found within helix II and two Leu residues (Leu 128 and Leu131) found within helix III of GPCRs. Mutation of the Leu 128 results in a constitutively active receptor—emphasizing the importance of this residue in maintaining the ground state (Tao, Y. X., et al., Mol. Endocrinol., 14:1272-1282 (2000); and Lu. Z. L., and Hulme, E. C., J. Biol. Chem., 274:7309-7315 (1999). Additional information relative to the functional relevance of several conserved residues within GPCRs may be found by reference to Okada et al in Trends Biochem. Sci., 25:318-324 (2001).

[0010] GPCRs include receptors for sensory signal mediators (e. g., light and olfactory stimulatory molecules); adenosine, bombesin, bradykinin, endothelin, y-aminobutyric acid (GABA), hepatocyte growth factor, melanocortins, neuropeptide Y, opioid peptides, opsins, somatostatin, tachykinins, vasoactive intestinal polypeptide family, and vasopressin; biogenic amines (e. g., dopamine, epinephrine and norepinephrine, histamine, glutamate (metabotropic effect), acetylcholine (muscarinic effect), and serotonin); chemokines; lipid mediators of inflammation (e. g., prostaglandins and prostanoids, platelet activating factor, and leukotrienes); and peptide hormones (e. g., calcitonin, C5a anaphylatoxin, follicle stimulating hormone (FSH), gonadotropic-releasing hormone (GnRH), neurokinin, and thyrotropin releasing hormone (TRH), and oxytocin). GPCRs which act as receptors for stimuli that have yet to be identified are known as orphan receptors.

[0011] GPCRs are implicated in inflammation and the immune response, and include the EGF module containing, mucin-like hormone receptor (Emrl) and CD97p receptor proteins. These receptors contain between three and seven potential calcium-binding EGF-like motifs (Baud, V. et al. (1995) Genomics 26: 334-344; Gray, J. X. et al. (1996) J. Immunol. 157: 5438-5447). These GPCRs are members of the recently characterized EGF-TM7 receptors family. In addition, post-translational modification of aspartic acid or asparagine to form erythro-p-hydroxyaspartic acid or erythro-p-hydroxyasparagine has been identified in a number of proteins with domains homologous to EGF. The consensus pattern is located in the N-terminus of the EGF-like domain. Examples of such proteins are blood coagulation factors VII, IX, and X; proteins C, S, and Z; the LDL receptor; and thrombomodulin.

[0012] GPCR mutations, which may cause loss of function or constitutive activation, have been associated with numerous human diseases (Coughlin, supra). For instance, retinitis pigmentosa may arise from mutations in the rhodopsin gene. Rhodopsin is the retinal photoreceptor which is located within the discs of the eye rod cell. Parma, J. et al. (1993, Nature 365: 649-651) reported that somatic activating mutations in the thyrotropin receptor cause hyperfunctioning thyroid adenomas and suggested that certain GPCRs susceptible to constitutive activation may behave as protooncogenes.

[0013] One large subfamily of GPCRs are the olfactory receptors. These receptors share the seven hydrophobic transmembrane domains of other GPCRs and function by registering G protein-mediated transduction of odorant signals. Numerous distinct olfactory receptors are required to distinguish different odors. Each olfactory sensory neuron expresses only one type of olfactory receptor, and distinct spatial zones of neurons expressing distinct receptors are found in nasal pasages. One olfactory receptor, the RAlc receptor which was isolated from a rat brain library, has been shown to be limited in expression to very distinct regions of the brain and a defined zone of the olfactory epithelium (Raming, K. et al., (1998) Receptors Channels 6: 141-151). In another example, three rat genes encoding olfactory-like receptors having typical GPCR characteristics showed expression patterns exclusively in taste, olfactory, and male reproductive tissue (Thomas, M. B. et al. (1996) Gene 178: 1-5).

[0014] Although olfactory receptors are typically associated with olfactory function and tend to localize to the olfactory bulb, there is increasing evidence that olfactory receptors and olfactory-like receptors may play more diverse roles in varying tissues (Yuan, T, T., Toy, P., McClary, J. A., Lin, R, J., Miyamoto, N, G., Kretschmer, P, J. Gene., 278(1-2):41-51, (2001); Blache, P., Gros, L., Salazar, G., Bataille, D, Biochem, Biophys, Res, Commun., 242(3):669-72, (1998); and Matsuoka, I., Mori, T., Aoki, J., Sato, T., Kurihara, K, Biochem, Biophys, Res, Commun., 194(l):504-11, (1993)).

[0015] Using the above examples, it is clear the availability of a novel cloned G-protein coupled receptor provides an opportunity for adjunct or replacement therapy, and are useful for the identification of G-protein coupled receptor agonists, or stimulators (which might stimulate and/or bias GPCR action), as well as, in the identification of G-protein coupled receptor inhibitors. All of which might be therapeutically useful under different circumstances.

[0016] The present invention also relates to recombinant vectors, which include the isolated nucleic acid molecules of the present invention, and to host cells containing the recombinant vectors, as well as to methods of making such vectors and host cells, in addition to their use in the production of HGPRBMY30_{—}1, HGPRBMY30_{—}2, HGPRBMY30_{—}3, HGPRBMY41_{—}1, HGPRBMY41_{—}2, HGPRBMY41_{—}3, HGPRBMY42, HGPRBMY42_{—}1, HGPRBMY43, and/or HGPRBMY44 polypeptides or peptides using recombinant techniques. Synthetic methods for producing the polypeptides and polynucleotides of the present invention are provided. Also provided are diagnostic methods for detecting diseases, disorders, and/or conditions related to the HGPRBMY30_{—}1, HGPRBMY30_{—}2, HGPRBMY30_{—}3, HGPRBMY41_{—}1, HGPRBMY41_{—}2, HGPRBMY41_{—}3, HGPRBMY42, HGPRBMY42_{—}1, HGPRBMY43, and/or HGPRBMY44 polypeptides and polynucleotides, and therapeutic methods for treating such diseases, disorders, and/or conditions. The invention further relates to screening methods for identifying binding partners of the polypeptides.

### BRIEF SUMMARY OF THE INVENTION

[0017] The present invention provides isolated nucleic acid molecules, that comprise, or alternatively consist of, a polynucleotide encoding the HGPRBMY30_{—}1, HGPRBMY30_{—}2, HGPRBMY30_{—}3, HGPRBMY41_{—}1, HGPRBMY41_{—}2, HGPRBMY41_{—}3, HGPRBMY42, HGPRBMY42_{—}1, HGPRBMY43, and/or HGPRBMY44 protein having the amino acid sequence shown in FIGS. 1A-C, FIGS. 2A-C, FIGS. 3A-C, FIGS. 4A-B, FIGS. 5A-B, FIGS. 6A-B, FIGS. 7A-B, FIGS. 8A-B, FIGS. 9A-B, and/or FIGS. 10A-D (SEQ ID NO:2, SEQ ID NO:4, SEQ ID NO:6, SEQ ID NO:8, SEQ ID NO:10, SEQ ID NO:12, SEQ ID NO:14, SEQ ID NO:16, SEQ ID NO:18, and/or SEQ ID NO:20), respectively, or the amino acid sequence encoded by the cDNA clone, HGPRBMY30_{—}1 (also referred to as GPCR99 and/or GPCR51 splice variant 1), HGPRBMY30_{—}2 (also referred to as GPCR99 and/or GPCR51 splice variant 2), HGPRBMY30_{—}3 (also referred to as GPCR99 and/or GPCR51 splice variant 3), HGPRBMY41_{—}1 (also referred to as GPCR-169), HGPRBMY41_{—}2 (also referred to as GPCR-169 splice variant 2), HGPRBMY41_{—}3 (also referred to as GPCR-169 splice variant 3), HGPRBMY42 (also referred to as GPCR-148, Gene 8, and/or HGPRBMY8), HGPRBMY42_{—}1 (also referred to as GPCR-148 splice variant 1), HGPRBMY43 (also referred to as GPCR96), and/or HGPRBMY44 (also referred to as GPCR106), deposited as ATCC Deposit Number PTA-4175 on Mar. 21, 2002.

[0018] The present invention also relates to recombinant vectors, which include the isolated nucleic acid molecules of the present invention, and to host cells containing the recombinant vectors, as well as to methods of making such vectors and host cells, in addition to their use in the production of HGPRBMY30_{—}1, HGPRBMY30_{—}2, HGPRBMY30_{—}3, HGPRBMY41_{—}1, HGPRBMY41_{—}2, HGPRBMY41_{—}3, HGPRBMY42, HGPRBMY42_{—}1, HGPRBMY43, and/or HGPRBMY44 polypeptides or peptides using recombinant techniques. Synthetic methods for producing the polypeptides and polynucleotides of the present invention are provided. Also provided are diagnostic methods for detecting diseases, disorders, and/or conditions related to the HGPRBMY30_{—}1, HGPRBMY30_{—}2, HGPRBMY30_{—}3, HGPRBMY41_{—}1, HGPRBMY41_{—}2, HGPRBMY41_{—}3, HGPRBMY42, HGPRBMY42_{—}1, HGPRBMY43, and/or HGPRBMY44 polypeptides and polynucleotides, and therapeutic methods for treating such diseases, disorders, and/or conditions. The invention further relates to screening methods for identifying binding partners of the polypeptides.

[0019] The invention further provides an isolated HGPRBMY30_{—}1, HGPRBMY30_{—}2, HGPRBMY30_{—}3, HGPRBMY41_{—}1, HGPRBMY41_{—}2, HGPRBMY41_{—}3, HGPRBMY42, HGPRBMY42_{—}1, HGPRBMY43, and/or HGPRBMY44 polypeptide having an amino acid sequence encoded by a polynucleotide described herein.

[0020] The invention further relates to a polynucleotide encoding a polypeptide fragment of SEQ ID NO:2, SEQ ID NO:4, SEQ ID NO:6, SEQ ID NO:8, SEQ ID NO:10, SEQ ID NO:12, SEQ ID NO:14, SEQ ID NO:16, SEQ ID NO:18, and/or SEQ ID NO:20, or a polypeptide fragment encoded by the cDNA sequence included in the deposited clone, which is hybridizable to SEQ ID NO:1, SEQ ID NO:3, SEQ ID NO:5, SEQ ID NO:7, SEQ ID NO:9, SEQ ID NO:11, SEQ ID NO:13, SEQ ID NO:15, SEQ ID NO:17, and/or SEQ ID NO:19.

[0021] The invention further relates to a polynucleotide encoding a polypeptide domain of SEQ ID NO:2, SEQ ID NO:4, SEQ ID NO:6, SEQ ID NO:8, SEQ ID NO:10, SEQ ID NO:12, SEQ ID NO:14, SEQ ID NO:16, SEQ ID NO:18, and/or SEQ ID NO:20 or a polypeptide domain encoded by the cDNA sequence included in the deposited clone, which is hybridizable to SEQ ID NO:1, SEQ ID NO:3, SEQ ID NO:5, SEQ ID NO:7, SEQ ID NO:9, SEQ ID NO:11, SEQ ID NO:13, SEQ ID NO:15, SEQ ID NO:17, and/or SEQ ID NO:19.

[0022] The invention further relates to a polynucleotide encoding a polypeptide epitope of SEQ ID NO:2, SEQ ID NO:4, SEQ ID NO:6, SEQ ID NO:8, SEQ ID NO:10, SEQ ID NO:12, SEQ ID NO:14, SEQ ID NO:16, SEQ ID NO:18, and/or SEQ ID NO:20 or a polypeptide epitope encoded by the cDNA sequence included in the deposited clone, which is hybridizable to SEQ ID NO:1, SEQ ID NO:3, SEQ ID NO:5, SEQ ID NO:7, SEQ ID NO:9, SEQ ID NO:11, SEQ ID NO:13, SEQ ID NO: 15, SEQ ID NO: 17, and/or SEQ ID NO:19.

[0023] The invention further relates to a polynucleotide encoding a polypeptide of SEQ ID NO:2, SEQ ID NO:4, SEQ ID NO:6, SEQ ID NO:8, SEQ ID NO:10, SEQ ID NO:12, SEQ ID NO:14, SEQ ID NO:16, SEQ ID NO:18, and/or SEQ ID NO:20 or the cDNA sequence included in the deposited clone, which is hybridizable to SEQ ID NO:1, SEQ ID NO:3, SEQ ID NO:5, SEQ ID NO:7, SEQ ID NO:9, SEQ ID NO:11, SEQ ID NO:13, SEQ ID NO:15, SEQ ID NO:17, and/or SEQ ID NO:19, having biological activity.

[0024] The invention further relates to a polynucleotide which is a variant of SEQ ID NO:1, SEQ ID NO:3, SEQ ID NO:5, SEQ ID NO:7, SEQ ID NO:9, SEQ ID NO:11, SEQ ID NO:13, SEQ ID NO:15, SEQ ID NO:17, and/or SEQ ID NO:19.

[0025] The invention further relates to a polynucleotide which is an allelic variant of SEQ ID NO:1, SEQ ID NO:3, SEQ ID NO:5, SEQ ID NO:7, SEQ ID NO:9, SEQ ID NO:11, SEQ ID NO:13, SEQ ID NO:15, SEQ ID NO:17, and/or SEQ ID NO:19.

[0026] The invention further relates to a polynucleotide which encodes a species homologue of the SEQ ID NO:2.

[0027] The invention further relates to a polynucleotide which represents the complimentary sequence (antisense) of SEQ ID NO:1, SEQ ID NO:3, SEQ ID NO:5, SEQ ID NO:7, SEQ ID NO:9, SEQ ID NO:11, SEQ ID NO:13, SEQ ID NO:15, SEQ ID NO:17, and/or SEQ ID NO:19.

[0028] The invention further relates to a polynucleotide capable of hybridizing under stringent conditions to any one of the polynucleotides specified herein, wherein said polynucleotide does not hybridize under stringent conditions to a nucleic acid molecule having a nucleotide sequence of only A residues or of only T residues.

[0029] The invention further relates to an isolated nucleic acid molecule of SEQ ID NO:2, SEQ ID NO:4, SEQ ID NO:6, SEQ ID NO:8, SEQ ID NO:10, SEQ ID NO:12, SEQ ID NO:14, SEQ ID NO:16, SEQ ID NO:18, and/or SEQ ID NO:20, wherein the polynucleotide fragment comprises a nucleotide sequence encoding a G-protein coupled receptor.

[0030] The invention further relates to an isolated nucleic acid molecule of SEQ ID NO:1, SEQ ID NO:3, SEQ ID NO:5, SEQ ID NO:7, SEQ ID NO:9, SEQ ID NO:11, SEQ ID NO:13, SEQ ID NO:15, SEQ ID NO:17, and/or SEQ ID NO:19, wherein the polynucleotide fragment comprises a nucleotide sequence encoding the sequence identified as SEQ ID NO:2, SEQ ID NO:4, SEQ ID NO:6, SEQ ID NO:8, SEQ ID NO:10, SEQ ID NO:12, SEQ ID NO:14, SEQ ID NO:16, SEQ ID NO:18, and/or SEQ ID NO:20 or the polypeptide encoded by the cDNA sequence included in the deposited clone, which is hybridizable to SEQ ID NO:1, SEQ ID NO:3, SEQ ID NO:5, SEQ ID NO:7, SEQ ID NO:9, SEQ ID NO:11, SEQ ID NO:13, SEQ ID NO:15, SEQ ID NO:17, and/or SEQ ID NO:19.

[0031] The invention further relates to an isolated nucleic acid molecule of of SEQ ID NO:1, SEQ ID NO:3, SEQ ID NO:5, SEQ ID NO:7, SEQ ID NO:9, SEQ ID NO:11, SEQ ID NO:13, SEQ ID NO:15, SEQ ID NO:17, and/or SEQ ID NO:19, wherein the polynucleotide fragment comprises the entire nucleotide sequence of SEQ ID NO:1, SEQ ID NO:3, SEQ ID NO:5, SEQ ID NO:7, SEQ ID NO:9, SEQ ID NO:11, SEQ ID NO:13, SEQ ID NO:15, SEQ ID NO:17, and/or SEQ ID NO:19 or the cDNA sequence included in the deposited clone, which is hybridizable to SEQ ID NO:1, SEQ ID NO:3, SEQ ID NO:5, SEQ ID NO:7, SEQ ID NO:9, SEQ ID NO:1, SEQ ID NO:13, SEQ ID NO:15, SEQ ID NO:17, and/or SEQ ID NO:19.

[0032] The invention further relates to an isolated nucleic acid molecule of SEQ ID NO:1, SEQ ID NO:3, SEQ ID NO:5, SEQ ID NO:7, SEQ ID NO:9, SEQ ID NO:11, SEQ ID NO:13, SEQ ID NO:15, SEQ ID NO:17, and/or SEQ ID NO:19, wherein the nucleotide sequence comprises sequential nucleotide deletions from either the C-terminus or the N-terminus.

[0033] The invention further relates to an isolated polypeptide comprising an amino acid sequence that comprises a polypeptide fragment of SEQ ID NO:2, SEQ ID NO:4, SEQ ID NO:6, SEQ ID NO:8, SEQ ID NO:10, SEQ ID NO:12, SEQ ID NO:14, SEQ ID NO:16, SEQ ID NO:18, and/or SEQ ID NO:20 or the encoded sequence included in the deposited clone.

[0034] The invention further relates to a polypeptide fragment of SEQ ID NO:2, SEQ ID NO:4, SEQ ID NO:6, SEQ ID NO:8, SEQ ID NO:10, SEQ ID NO:12, SEQ ID NO:14, SEQ ID NO:16, SEQ ID NO:18, and/or SEQ ID NO:20 or the encoded sequence included in the deposited clone, having biological activity.

[0035] The invention further relates to a polypeptide domain of SEQ ID NO:2, SEQ ID NO:4, SEQ ID NO:6, SEQ ID NO:8, SEQ ID NO:10, SEQ ID NO:12, SEQ ID NO:14, SEQ ID NO:16, SEQ ID NO:18, and/or SEQ ID NO:20 or the encoded sequence included in the deposited clone.

[0036] The invention further relates to a polypeptide epitope of SEQ ID NO:2, SEQ ID NO:4, SEQ ID NO:6, SEQ ID NO:8, SEQ ID NO:10, SEQ ID NO:12, SEQ ID NO:14, SEQ ID NO:16, SEQ ID NO:18, and/or SEQ ID NO:20 or the encoded sequence included in the deposited clone.

[0037] The invention further relates to a full length protein of SEQ ID NO:2, SEQ ID NO:4, SEQ ID NO:6, SEQ ID NO:8, SEQ ID NO:10, SEQ ID NO:12, SEQ ID NO:14, SEQ ID NO:16, SEQ ID NO:18, and/or SEQ ID NO:20 or the encoded sequence included in the deposited clone.

[0038] The invention further relates to a variant of SEQ ID NO:2.

[0039] The invention further relates to an allelic variant of SEQ ID NO:2. The invention further relates to a species homologue of SEQ ID NO:2.

[0040] The invention further relates to the isolated polypeptide of of SEQ ID NO:2, SEQ ID NO:4, SEQ ID NO:6, SEQ ID NO:8, SEQ ID NO:10, SEQ ID NO:12, SEQ ID NO:14, SEQ ID NO:16, SEQ ID NO:18, and/or SEQ ID NO:20, wherein the full length protein comprises sequential amino acid deletions from either the C-terminus or the N-terminus.

[0041] The invention further relates to an isolated antibody that binds specifically to the isolated polypeptide of SEQ ID NO:2.

[0042] The invention further relates to a method for preventing, treating, or ameliorating a medical condition, comprising administering to a mammalian subject a therapeutically effective amount of the polypeptide of SEQ ID NO:2, SEQ ID NO:4, SEQ ID NO:6, SEQ ID NO:8, SEQ ID NO:10, SEQ ID NO:12, SEQ ID NO:14, SEQ ID NO:16, SEQ ID NO:18, and/or SEQ ID NO:20 or the polynucleotide of SEQ ID NO:1, SEQ ID NO:3, SEQ ID NO:5, SEQ ID NO:7, SEQ ID NO:9, SEQ ID NO:11, SEQ ID NO:13, SEQ ID NO:15, SEQ ID NO:17, and/or SEQ ID NO:19.

[0043] The invention further relates to a method of diagnosing a pathological condition or a susceptibility to a pathological condition in a subject comprising the steps of (a) determining the presence or absence of a mutation in the polynucleotide of SEQ ID NO:1, SEQ ID NO:3, SEQ ID NO:5, SEQ ID NO:7, SEQ ID NO:9, SEQ ID NO:11, SEQ ID NO:13, SEQ ID NO:15, SEQ ID NO:17, and/or SEQ ID NO:19; and (b) diagnosing a pathological condition or a susceptibility to a pathological condition based on the presence or absence of said mutation.

[0044] The invention further relates to a method of diagnosing a pathological condition or a susceptibility to a pathological condition in a subject comprising the steps of (a) determining the presence or amount of expression of the polypeptide of of SEQ ID NO:2, SEQ ID NO:4, SEQ ID NO:6, SEQ ID NO:8, SEQ ID NO:10, SEQ ID NO:12, SEQ ID NO:14, SEQ ID NO:16, SEQ ID NO:18, and/or SEQ ID NO:20 in a biological sample; and diagnosing a pathological condition or a susceptibility to a pathological condition based on the presence or amount of expression of the polypeptide.

[0045] The invention further relates to a method for identifying a binding partner to the polypeptide of SEQ ID NO:2, SEQ ID NO:4, SEQ ID NO:6, SEQ ID NO:8, SEQ ID NO:10, SEQ ID NO:12, SEQ ID NO:14, SEQ ID NO:16, SEQ ID NO:18, and/or SEQ ID NO:20 comprising the steps of (a) contacting the polypeptide of SEQ ID NO:2, SEQ ID NO:4, SEQ ID NO:6, SEQ ID NO:8, SEQ ID NO:10, SEQ ID NO:12, SEQ ID NO:14, SEQ if NO:16, SEQ ID NO:18, and/or SEQ ID NO:20 with a binding partner; and (b) determining whether the binding partner effects an activity of the polypeptide.

[0046] The invention further relates to a gene corresponding to the cDNA sequence of SEQ ID NO:1, SEQ ID NO:3, SEQ ID NO:5, SEQ ID NO:7, SEQ ID NO:9, SEQ ID NO:11, SEQ ID NO:13, SEQ ID NO:15, SEQ ID NO:17, and/or SEQ ID NO:19.

[0047] The invention further relates to a method of identifying an activity in a biological assay, wherein the method comprises the steps of expressing SEQ ID NO:1, SEQ ID NO:3, SEQ ID NO:5, SEQ ID NO: 7, SEQ ID NO:9, SEQ ID NO:11, SEQ ID NO:13, SEQ ID NO:15, SEQ ID NO:17, and/or SEQ ID NO:19 in a cell, (b) isolating the supernatant; (c) detecting an activity in a biological assay; and (d) identifying the protein in the supernatant having the activity.

[0048] The invention further relates to a process for making polynucleotide sequences encoding gene products having altered activity selected from the group consisting of SEQ ID NO:2, SEQ ID NO:4, SEQ ID NO:6, SEQ ID NO:8, SEQ ID NO:10, SEQ ID NO:12, SEQ ID NO:14, SEQ ID NO:16, SEQ ID NO:18, and/or SEQ ID NO:20 activity comprising the steps of (a) shuffling a nucleotide sequence of SEQ ID NO:1, SEQ ID NO:3, SEQ ID NO:5, SEQ ID NO:7, SEQ ID NO:9, SEQ ID NO:11, SEQ ID NO:13, SEQ ID NO:15, SEQ ID NO:17, and/or SEQ ID NO:19, (b) expressing the resulting shuffled nucleotide sequences and, (c) selecting for altered activity selected from the group consisting of SEQ ID NO:2, SEQ ID NO:4, SEQ ID NO:6, SEQ ID NO:8, SEQ ID NO:10, SEQ ID NO:12, SEQ ID NO: 14, SEQ ID NO:16, SEQ ID NO:18, and/or SEQ ID NO:20 activity as compared to the activity selected from the group consisting of SEQ ID NO:2, SEQ ID NO:4, SEQ ID NO:6, SEQ ID NO:8, SEQ ID NO:10, SEQ ID NO:12, SEQ ID NO:14, SEQ ID NO:16, SEQ ID NO:18, and/or SEQ ID NO:20 activity of the gene product of said unmodified nucleotide sequence.

[0049] The invention further relates to a shuffled polynucleotide sequence produced by a shuffling process, wherein said shuffled DNA molecule encodes a gene product having enhanced tolerance to an inhibitor of any one of the activities selected from the group consisting of SEQ ID NO:2, SEQ ID NO:4, SEQ ID NO:6, SEQ ID NO:8, SEQ ID NO:10, SEQ ID NO:12, SEQ ID NO:14, SEQ ID NO:16, SEQ ID NO:18, and/or SEQ ID NO:20 activity.

[0050] The invention further relates to a method for preventing, treating, or ameliorating a medical condition with the polypeptide provided as SEQ ID NO:2, SEQ ID NO:4, SEQ ID NO:6, SEQ ID NO:8, SEQ ID NO:10, SEQ ID NO:12, SEQ ID NO:14, SEQ ID NO:16, SEQ ID NO:18, and/or SEQ ID NO:20, in addition to, its encoding nucleic acid, wherein the medical condition is a reproductive disorder.

[0051] The invention further relates to a method for preventing, treating, or ameliorating a medical condition with the polypeptide provided as SEQ ID NO:2, SEQ ID NO:4, SEQ ID NO:6, SEQ ID NO:8, SEQ ID NO:10, SEQ ID NO:12, SEQ ID NO:14, SEQ ID NO:16, SEQ ID NO:18, and/or SEQ ID NO:20, in addition to, its encoding nucleic acid, wherein the medical condition is a disorder related to aberrant G-protein coupled signaling.

[0052] The invention further relates to a method for preventing, treating, or ameliorating a medical condition with the polypeptide provided as SEQ ID NO:2, SEQ ID NO:4, SEQ ID NO:6, SEQ ID NO:8, SEQ ID NO:10, SEQ ID NO:12, SEQ ID NO:14, SEQ ID NO:16, SEQ ID NO:18, and/or SEQ ID NO:20, in addition to, its encoding nucleic acid, wherein the medical condition is a disorder related to aberrant G-protein coupled receptor dependent odorant signaling.

[0053] The invention further relates to a method for preventing, treating, or ameliorating a medical condition with the polypeptide provided as SEQ ID NO:2, SEQ ID NO:4, SEQ ID NO:6, SEQ ID NO:8, SEQ ID NO:10, SEQ ID NO:12, SEQ ID NO:14, SEQ ID NO:16, SEQ ID NO:18, and/or SEQ ID NO:20, in addition to, its encoding nucleic acid, wherein the medical condition is a male reproductive disorder.

[0054] The invention further relates to a method for preventing, treating, or ameliorating a medical condition with the polypeptide provided as SEQ ID NO:2, SEQ ID NO:4, SEQ ID NO:6, SEQ ID NO:8, SEQ ID NO:10, SEQ ID NO:12, SEQ ID NO:14, SEQ ID NO:16, SEQ ID NO:18, and/or SEQ ID NO:20, in addition to, its encoding nucleic acid, wherein the medical condition is a developmental disorder.

[0055] The invention further relates to a method for preventing, treating, or ameliorating a medical condition with the polypeptide provided as SEQ ID NO:2, SEQ ID NO:4, SEQ ID NO:6, SEQ ID NO:8, SEQ ID NO:10, SEQ ID NO:12, SEQ ID NO:14, SEQ ID NO:16, SEQ ID NO:18, and/or SEQ ID NO:20, in addition to, its encoding nucleic acid, wherein the medical condition is a skeletal muscle disorder.

[0056] The invention further relates to a method for preventing, treating, or ameliorating a medical condition with the polypeptide provided as SEQ ID NO:2, SEQ ID NO:4, SEQ ID NO:6, SEQ ID NO:8, SEQ ID NO:10, SEQ ID NO:12, SEQ ID NO:14, SEQ ID NO:16, SEQ ID NO:18, and/or SEQ ID NO:20, in addition to, its encoding nucleic acid, wherein the medical condition is a dystrophy.

[0057] The invention further relates to a method of identifying a compound that modulates the biological activity of HGPRBMY30_{—}1, HGPRBMY30_{—}2, HGPRBMY30_{—}3, HGPRBMY41_{—}1, HGPRBMY41_{—}2, HGPRBMY41_{—}3, HGPRBMY42, HGPRBMY42_{—}1, HGPRBMY43, and/or HGPRBMY44, comprising the steps of, (a) combining a candidate modulator compound with HGPRBMY30_{—}1, HGPRBMY30_{—}2, HGPRBMY30_{—}3, HGPRBMY41_{—}1, HGPRBMY41_{—}2, HGPRBMY41_{—}3, HGPRBMY42, HGPRBMY42_{—}1, HGPRBMY43, and/or HGPRBMY44 having the sequence set forth in SEQ ID NO:2; and measuring an effect of the candidate modulator compound on the activity of HGPRBMY30_{—}1, HGPRBMY30_{—}2, HGPRBMY30_{—}3, HGPRBMY41_{—}1, HGPRBMY41_{—}2, HGPRBMY41_{—}3, HGPRBMY42, HGPRBMY42 1, HGPRBMY43, and/or HGPRBMY44.

[0058] The invention further relates to a method of identifying a compound that modulates the biological activity of a GPCR, comprising the steps of, (a) combining a candidate modulator compound with a host cell expressing HGPRBMY30_{—}1, HGPRBMY30_{—}2, HGPRBMY30_{—}3, HGPRBMY41_{—}1, HGPRBMY41_{—}2, HGPRBMY41_{—}3, HGPRBMY42, HGPRBMY42_{—}1, HGPRBMY43, and/or HGPRBMY44 having the sequence as set forth in SEQ ID NOS:2; and, (b) measuring an effect of the candidate modulator compound on the activity of the expressed HGPRBMY30_{—}1, HGPRBMY30_{—}2, HGPRBMY30_{—}3, HGPRBMY41_{—}1, HGPRBMY41_{—}2, HGPRBMY41_{—}3, HGPRBMY42, HGPRBMY42_{—}1, HGPRBMY43, and/or HGPRBMY44.

[0059] The invention further relates to a method of identifying a compound that modulates the biological activity of HGPRBMY30_{—}1, HGPRBMY30_{—}2, HGPRBMY30_{—}3, HGPRBMY41_{—}1, HGPRBMY41_{—}2, HGPRBMY41_{—}3, HGPRBMY42, HGPRBMY42_{—}1, HGPRBMY43, and/or HGPRBMY44, comprising the steps of, (a) combining a candidate modulator compound with a host cell containing a vector described herein, wherein HGPRBMY30_{—}1, HGPRBMY30_{—}2, HGPRBMY30_{—}3, HGPRBMY41_{—}1, HGPRBMY41_{—}2, HGPRBMY41_{—}3, HGPRBMY42, HGPRBMY42_{—}1, HGPRBMY43, and/or HGPRBMY44 is expressed by the cell; and, (b) measuring an effect of the candidate modulator compound on the activity of the expressed HGPRBMY30_{—}1, HGPRBMY30_{—}2, HGPRBMY30_{—}3, HGPRBMY41_{—}1, HGPRBMY41_{—}2, HGPRBMY41_{—}3, HGPRBMY42, HGPRBMY42_{—}1, HGPRBMY43, and/or HGPRBMY44.

[0060] The invention further relates to a method of screening for a compound that is capable of modulating the biological activity of HGPRBMY30_{—}1, HGPRBMY30_{—}2, HGPRBMY30_{—}3, HGPRBMY41_{—}1, HGPRBMY41_{—}2, HGPRBMY41_{—}3, HGPRBMY42, HGPRBMY42_{—}1, HGPRBMY43, and/or HGPRBMY44, comprising the steps of: (a) providing a host cell described herein; (b) determining the biological activity of HGPRBMY30_{—}1, HGPRBMY30_{—}2, HGPRBMY30_{—}3, HGPRBMY41_{—}1, HGPRBMY41_{—}2, HGPRBMY41_{—}3, HGPRBMY42, HGPRBMY42_{—}1, HGPRBMY43, and/or HGPRBMY44 in the absence of a modulator compound; (c) contacting the cell with the modulator compound; and (d) determining the biological activity of HGPRBMY30_{—}1, HGPRBMY30_{—}2, HGPRBMY30_{—}3, HGPRBMY41_{—}1, HGPRBMY41_{—}2, HGPRBMY41_{—}3, HGPRBMY42, HGPRBMY42_{—}1, HGPRBMY43, and/or HGPRBMY44 in the presence of the modulator compound; wherein a difference between the activity of HGPRBMY30_{—}1, HGPRBMY30_{—}2, HGPRBMY30_{—}3, HGPRBMY41_{—}1, HGPRBMY41_{—}2, HGPRBMY41_{—}3, HGPRBMY42, HGPRBMY42_{—}1, HGPRBMY43, and/or HGPRBMY44 in the presence of the modulator compound and in the absence of the modulator compound indicates a modulating effect of the compound.

[0061] The invention further relates to a compound that modulates the biological activity of human HGPRBMY30_{—}1, HGPRBMY30_{—}2, HGPRBMY30_{—}3, HGPRBMY41_{—}1, HGPRBMY41_{—}2, HGPRBMY41_{—}3, HGPRBMY42, HGPRBMY42_{—}1, HGPRBMY43, and/or HGPRBMY44 as identified by the methods described herein.

[0062] The invention further relates to a method of screening for candidate compounds capable of modulating the activity of a G-protein coupled receptor polypeptide, comprising: (i) contacting a test compound with a cell or tissue comprising an expression vector capable of expressing a polypeptide comprising an amino acid sequence as set forth in SEQ ID NO:2, SEQ ID NO:4, SEQ ID NO:6, SEQ ID NO:8, SEQ ID NO:10, SEQ ID NO:12, SEQ ID NO:14, SEQ ID NO:16, SEQ ID NO:18, and/or SEQ ID NO:20, or encoded by ATCC deposit HGPRBMY30_{—}1, HGPRBMY30_{—}2, HGPRBMY30_{—}3, HGPRBMY41_{—}1, HGPRBMY41_{—}2, HGPRBMY41_{—}3, HGPRBMY42, HGPRBMY42_{—}1, HGPRBMY43, and/or HGPRBMY44, under conditions in which said polypeptide is expressed; and (ii) selecting as candidate modulating compounds those test compounds that modulate activity of the G-protein coupled receptor polypeptide.

[0063] The invention further relates to a method of screening for candidate compounds capable of modulating the activity of a G-protein coupled receptor polypeptide, comprising: (i) contacting a test compound with a cell or tissue comprising an expression vector capable of expressing a polypeptide comprising an amino acid sequence as set forth in SEQ ID NO:2, SEQ ID NO:4, SEQ ID NO:6, SEQ ID NO:8, SEQ ID NO:10, SEQ ID NO:12, SEQ ID NO:14, SEQ ID NO:16, SEQ ID NO:18, and/or SEQ ID NO:20, or encoded by ATCC deposit HGPRBMY30_{—}1, HGPRBMY30_{—}2, HGPRBMY30_{—}3, HGPRBMY41_{—}1, HGPRBMY41_{—}2, HGPRBMY41_{—}3, HGPRBMY42, HGPRBMY42_{—}1, HGPRBMY43, and/or HGPRBMY44, under conditions in which said polypeptide is expressed; and (ii) selecting as candidate modulating compounds those test compounds that modulate activity of the G-protein coupled receptor polypeptide, wherein said cells are CHO cells.

[0064] The invention further relates to a method of screening for candidate compounds capable of modulating the activity of a G-protein coupled receptor polypeptide, comprising: (i) contacting a test compound with a cell or tissue comprising an expression vector capable of expressing a polypeptide comprising an amino acid sequence as set forth in SEQ ID NO:2, SEQ ID NO:4, SEQ ID NO:6, SEQ ID NO:8, SEQ ID NO:10, SEQ ID NO:12, SEQ ID NO:14, SEQ ID NO:16, SEQ ID NO:18, and/or SEQ ID NO:20, or encoded. by ATCC deposit HGPRBMY30_{—}1, HGPRBMY30_{—}2, HGPRBMY30_{—}3, HGPRBMY41_{—}1, HGPRBMY41_{—}2, HGPRBMY41_{—}3, HGPRBMY42, HGPRBMY42_{—}1, HGPRBMY43, and/or HGPRBMY44, under conditions in which said polypeptide is expressed; and (ii) selecting as candidate modulating compounds those test compounds that modulate activity of the G-protein coupled receptor polypeptide, wherein said cells are CHO cells that comprise a vector comprising the coding sequence of the beta lactamase gene under the control of NFAT response elements.

[0065] The invention further relates to a method of screening for candidate compounds capable of modulating the activity of a G-protein coupled receptor polypeptide, comprising: (i) contacting a test compound with a cell or tissue comprising an expression vector capable of expressing a polypeptide comprising an amino acid sequence as set forth in SEQ ID NO:2, SEQ ID NO:4, SEQ ID NO:6, SEQ ID NO:8, SEQ ID NO:10, SEQ ID NO:12, SEQ ID NO:14, SEQ ID NO:16, SEQ ID NO:18, and/or SEQ ID NO:20, or encoded by ATCC deposit to HGPRBMY30_{—}1, HGPRBMY30_{—}2, HGPRBMY30_{—}3, HGPRBMY41_{—}1, HGPRBMY41_{—}2, HGPRBMY41_{—}3, HGPRBMY42, HGPRBMY42_{—}1, HGPRBMY43, and/or HGPRBMY44, under conditions in which said polypeptide is expressed; and (ii) selecting as candidate modulating compounds those test compounds that modulate activity of the G-protein coupled receptor polypeptide, wherein said cells are CHO cells that comprise a vector comprising the coding sequence of the beta lactamase gene under the control of NFAT response elements, wherein said cells further comprise a vector comprising the coding sequence of G alpha 15 under conditions wherein G alpha 15 is expressed.

[0066] The invention further relates to a method of screening for candidate compounds capable of modulating the activity of a G-protein coupled receptor polypeptide, comprising: (i) contacting a test compound with a cell or tissue comprising an expression vector capable of expressing a polypeptide comprising an amino acid sequence as set forth in SEQ ID NO:2, SEQ ID NO:4, SEQ ID NO:6, SEQ ID NO:8, SEQ ID NO:10, SEQ ID NO:12, SEQ ID NO:14, SEQ ID NO:16, SEQ ID NO:18, and/or SEQ ID NO:20, or encoded by ATCC deposit HGPRBMY30_{—}1, HGPRBMY30_{—}2, HGPRBMY30_{—}3, HGPRBMY41_{—}1, HGPRBMY41_{—}2, HGPRBMY41_{—}3, HGPRBMY42, HGPRBMY42_{—}1, HGPRBMY43, and/or HGPRBMY44, under conditions in which said polypeptide is expressed; and (ii) selecting as candidate modulating compounds those test compounds that modulate activity of the G-protein coupled receptor polypeptide, wherein said cells are CHO cells that comprise a vector comprising the coding sequence of the beta lactamase gene under the control of CRE response elements.

[0067] The invention further relates to a method of screening for candidate compounds capable of modulating the activity of a G-protein coupled receptor polypeptide, comprising: (i) contacting a test compound with a cell or tissue comprising an expression vector capable of expressing a polypeptide comprising an amino acid sequence as set forth in SEQ ID NO:2, SEQ ID NO:4, SEQ ID NO:6, SEQ ID NO:8, SEQ ID NO:10, SEQ ID NO:12, SEQ ID NO:14, SEQ ID NO:16, SEQ ID NO:18, and/or SEQ ID NO:20, or encoded by ATCC deposit HGPRBMY30_{—}1, HGPRBMY30_{—}2, HGPRBMY30_{—}3, HGPRBMY41_{—}1, HGPRBMY41_{—}2, HGPRBMY41_{—}3, HGPRBMY42, HGPRBMY42_{—}1, HGPRBMY43, and/or HGPRBMY44, under conditions in which said polypeptide is expressed; and (ii) selecting as candidate modulating compounds those test compounds that modulate activity of the G-protein coupled receptor polypeptide, wherein said cells are HEK cells.

[0068] The invention further relates to a method of screening for candidate compounds capable of modulating the activity of a G-protein coupled receptor polypeptide, comprising: (i) contacting a test compound with a cell or tissue comprising an expression vector capable of expressing a polypeptide comprising an amino acid sequence as set forth in SEQ ID NO:2, SEQ ID NO:4, SEQ ID NO:6, SEQ ID NO:8, SEQ ID NO:10, SEQ ID NO:12, SEQ ID NO:14, SEQ ID NO:16, SEQ ID NO:18, and/or SEQ ID NO:20, or encoded by ATCC deposit HGPRBMY30_{—}1, HGPRBMY30_{—}2, HGPRBMY30_{—}3, HGPRBMY41_{—}1, HGPRBMY41_{—}2, HGPRBMY41_{—}3, HGPRBMY42, HGPRBMY42_{—}1, HGPRBMY43, and/or HGPRBMY44, under conditions in which said polypeptide is expressed; and (ii) selecting as candidate modulating compounds those test compounds that modulate activity of the G-protein coupled receptor polypeptide, wherein said cells are HEK cells wherein said cells comprise a vector comprising the coding sequence of the beta lactamase gene under the control of CRE response elements.

[0069] The invention further relates to a method of screening for candidate compounds capable of modulating the activity of a G-protein coupled receptor polypeptide, comprising: (i) contacting a test compound with a cell or tissue comprising an expression vector capable of expressing a polypeptide comprising an amino acid sequence as set forth in SEQ ID NO:2, SEQ ID NO:4, SEQ ID NO:6, SEQ ID NO:8, SEQ ID NO:10, SEQ ID NO:12, SEQ ID NO:14, SEQ ID NO:16, SEQ ID NO:18, and/or SEQ ID NO:20, or encoded by ATCC deposit HGPRBMY30_{—}1, HGPRBMY30_{—}2, HGPRBMY30_{—}3, HGPRBMY41_{—}1, HGPRBMY41_{—}2, HGPRBMY41_{—}3, HGPRBMY42, HGPRBMY42_{—}1, HGPRBMY43, and/or HGPRBMY44, under conditions in which said polypeptide is expressed; and (ii) selecting as candidate modulating compounds those test compounds that modulate activity of the G-protein coupled receptor polypeptide, wherein said cells are CHO cells that comprise a vector comprising the coding sequence of the beta lactamase gene under the control of NFAT response elements, wherein said cells further comprise a vector comprising the coding sequence of G alpha 15 under conditions wherein G alpha 15 is expressed, and further wherein said cells express the polypeptide at either low, moderate, or high levels.

[0070] The invention further relates to a method of screening for candidate compounds capable of modulating the activity of a G-protein coupled receptor polypeptide, comprising: (i) contacting a test compound with a cell or tissue comprising an expression vector capable of expressing a polypeptide comprising an amino acid sequence as set forth in SEQ ID NO:2, SEQ ID NO:4, SEQ ID NO:6, SEQ ID NO:8, SEQ ID NO:10, SEQ ID NO:12, SEQ ID NO:14, SEQ ID NO:16, SEQ ID NO:18, and/or SEQ ID NO:20, or encoded by ATCC deposit HGPRBMY30_{—}1, HGPRBMY30_{—}2, HGPRBMY30_{—}3, HGPRBMY41_{—}1, HGPRBMY41_{—}2, HGPRBMY41_{—}3, HGPRBMY42, HGPRBMY42_{—}1 HGPRBMY43, and/or HGPRBMY44, under conditions in which said polypeptide is expressed; and (ii) selecting as candidate modulating compounds those test compounds that modulate activity of the G-protein coupled receptor polypeptide, wherein said cells are CHO cells that comprise a vector comprising the coding sequence of the beta lactamase gene under the control of NFAT response elements, wherein said cells further comprise a vector comprising the coding sequence of G alpha 15 under conditions wherein G alpha 15 is expressed, wherein said candidate compound is a small molecule, a peptide, or an antisense molecule.

[0071] The invention further relates to a method of screening for candidate compounds capable of modulating the activity of a G-protein coupled receptor polypeptide, comprising: (i) contacting a test compound with a cell or tissue comprising an expression vector capable of expressing a polypeptide comprising an amino acid sequence as set forth in SEQ ID NO:2, SEQ ID NO:4, SEQ ID NO:6, SEQ ID NO:8, SEQ ID NO:10, SEQ ID NO:12, SEQ ID NO:14, SEQ ID NO:16, SEQ ID NO:18, and/or SEQ ID NO:20, or encoded by ATCC deposit HGPRBMY30_{—}1, HGPRBMY30_{—}2, HGPRBMY30_{—}3, HGPRBMY41_{—}1, HGPRBMY41_{—}2, HGPRBMY41_{—}3, HGPRBMY42, HGPRBMY42_{—}1, HGPRBMY43, and/or HGPRBMY44, under conditions in which said polypeptide is expressed; and (ii) selecting as candidate modulating compounds those test compounds that modulate activity of the G-protein coupled receptor polypeptide, wherein said cells are CHO cells that comprise a vector comprising the coding sequence of the beta lactamase gene under the control of NFAT response elements, wherein said cells further comprise a vector comprising the coding sequence of G alpha 15 under conditions wherein G alpha 15 is expressed, wherein said candidate compound is a small molecule, a peptide, or an antisense molecule, wherein said candidate compound is an agonist or antagonist.

[0072] The invention further relates to a method of screening for candidate compounds capable of modulating the activity of a G-protein coupled receptor polypeptide, comprising: (i) contacting a test compound with a cell or tissue comprising an expression vector capable of expressing a polypeptide comprising an amino acid sequence as set forth in SEQ ID NO:2, SEQ ID NO:4, SEQ ID NO:6, SEQ ID NO:8, SEQ ID NO:10, SEQ ID NO:12, SEQ ID NO:14, SEQ ID NO:16, SEQ ID NO:18, and/or SEQ ID NO:20, or encoded by ATCC deposit HGPRBMY30_{—}1, HGPRBMY30_{—}2, HGPRBMY30_{—}3, HGPRBMY41_{—}1, HGPRBMY41_{—}2, HGPRBMY41_{—}3, HGPRBMY42, HGPRBMY42_{—}1, HGPRBMY43, and/or HGPRBMY44, under conditions in which said polypeptide is expressed; and (ii) selecting as candidate modulating compounds those test compounds that modulate activity of the G-protein coupled receptor polypeptide, wherein said cells are HEK cells wherein said cells comprise a vector comprising the coding sequence of the beta lactamase gene under the control of CRE response elements, wherein said candidate compound is a small molecule, a peptide, or an antisense molecule.

[0073] The invention further relates to a method of screening for candidate compounds capable of modulating the activity of a G-protein coupled receptor polypeptide, comprising: (i) contacting a test compound with a cell or tissue comprising an expression vector capable of expressing a polypeptide comprising an amino acid sequence as set forth in SEQ ID NO:2, SEQ ID NO:4, SEQ ID NO:6, SEQ ID NO:8, SEQ ID NO:10, SEQ ID NO:12, SEQ ID NO:14, SEQ ID NO:16, SEQ ID NO:18, and/or SEQ ID NO:20, or encoded by ATCC deposit HGPRBMY30_{—}1, HGPRBMY30_{—}2, HGPRBMY30_{—}3, HGPRBMY41_{—}1, HGPRBMY41_{—}2, HGPRBMY41_{—}3, HGPRBMY42, HGPRBMY42_{—}1, HGPRBMY43, and/or HGPRBMY44, under conditions in which said polypeptide is expressed; and (ii) selecting as candidate modulating compounds those test compounds that modulate activity of the G-protein coupled receptor polypeptide, wherein said cells are HEK cells wherein said cells comprise a vector comprising the coding sequence of the beta lactamase gene under the control of CRE response elements, wherein said candidate compound is a small molecule, a peptide, or an antisense molecule, wherein said candidate compound is an agonist or antagonist.

[0074] The invention further relates to a method of screening for candidate compounds capable of modulating the activity of a G-protein coupled receptor polypeptide, comprising: (i) contacting a test compound with a cell or tissue comprising an expression vector capable of expressing a polypeptide comprising an amino acid sequence as set forth in SEQ ID NO:2, SEQ ID NO:4, SEQ ID NO:6, SEQ ID NO:8, SEQ ID NO:10, SEQ ID NO:12, SEQ ID NO:14, SEQ ID NO:16, SEQ ID NO:18, and/or SEQ ID NO:20, or encoded by ATCC deposit HGPRBMY30_{—}1, HGPRBMY30_{—}2, HGPRBMY30_{—}3, HGPRBMY41_{—}1, HGPRBMY41_{—}2, HGPRBMY41_{—}3, HGPRBMY42, HGPRBMY42_{—}1, HGPRBMY43, and/or HGPRBMY44, under conditions in which said polypeptide is expressed; and (ii) selecting as candidate modulating compounds those test compounds that modulate activity of the G-protein coupled receptor polypeptide, wherein said cells are CHO cells that comprise a vector comprising the coding sequence of the beta lactamase gene under the control of NFAT response elements, wherein said cells further comprise a vector comprising the coding sequence of G alpha 15 under conditions wherein G alpha 15 is expressed, wherein said cells express beta lactamase at low, moderate, or high levels.

[0075] The invention further relates to a method of screening for candidate compounds capable of modulating the activity of a G-protein coupled receptor polypeptide, comprising: (i) contacting a test compound with a cell or tissue comprising an expression vector capable of expressing a polypeptide comprising an amino acid sequence as set forth in SEQ ID NO:2, SEQ ID NO:4, SEQ ID NO:6, SEQ ID NO:8, SEQ ID NO:10, SEQ ID NO:12, SEQ ID NO:14, SEQ ID NO:16, SEQ ID NO:18, and/or SEQ ID NO:20, or encoded by ATCC deposit HGPRBMY30_{—}1, HGPRBMY30_{—}2, HGPRBMY30_{—}3, HGPRBMY41_{—}1, HGPRBMY41_{—}2, HGPRBMY41_{—}3, HGPRBMY42, HGPRBMY42_{—}1, HGPRBMY43, and/or HGPRBMY44, under conditions in which said polypeptide is expressed; and (ii) selecting as candidate modulating compounds those test compounds that modulate activity of the G-protein coupled receptor polypeptide, wherein said cells are HEK cells wherein said cells comprise a vector comprising the coding sequence of the beta lactamase gene under the control of CRE response elements, wherein said cells express beta lactamase at low, moderate, or high levels.

[0076] The statement, “wherein said cells express beta lactamase at low, moderate, or high levels” is a reference to cells that either express beta lactamase at low, moderate, or high levels relative to the expression levels of a reference mRNA, gene, or protein; or a reference to the actual percentage of cells that express beta lactamase. In the latter example, high levels of expression would be achieved if the majority of cells were expressing beta lactamase, while low levels of expression would be achieved if only a subset of cells were expressing beta lactamase. Such cells may also express other proteins, such as the proteins of the present invention at low, moderate, or high levels as well.

[0077] The invention further relates to a method for preventing, treating, or ameliorating a medical condition with the polypeptide provided as SEQ ID NO:8, 10, or 12, in addition to, its encoding nucleic acid, or a modulator thereof, wherein the medical condition is a member of the group consisting of: ovarian cancer or related proliferative condition of the ovary, stomach cancer or related proliferative condition of the stomach, colon cancer or related proliferative condition of the colon, and kidney cancer or related proliferative condition of the kidney.

[0078] The invention further relates to a method of diagnosing a pathological condition or a susceptibility to a pathological condition in a subject comprising the steps of (a) determining the presence or amount of expression of the polypeptide of of SEQ ID NO:8, 10, or 12 in a biological sample; (b) and diagnosing a pathological condition or a susceptibility to a pathological condition based on the presence or amount of expression of the polypeptide relative to a control, wherein said condition is a member of the group consisting of: ovarian cancer or related proliferative condition of the ovary, stomach cancer or related proliferative condition of the stomach, colon cancer or related proliferative condition of the colon, and kidney cancer or related proliferative condition of the kidney.

### BRIEF DESCRIPTION OF THE FIGURES/DRAWINGS

[0079] FIGS. 1A-C show the polynucleotide sequence (SEQ ID NO:1) and deduced amino acid sequence (SEQ ID NO:2) of the novel human G-protein coupled receptor, HGPRBMY30_{—}1 of the present invention. The standard one-letter abbreviation for amino acids is used to illustrate the deduced amino acid sequence. The polynucleotide sequence contains a sequence of 2592 nucleotides (SEQ ID NO:1), encoding a polypeptide of 863 amino acids (SEQ ID NO:2). It is anticipated that the HGPRBMY30_{—}1, polypeptide may function as a G-protein coupled receptor as described more particularly elsewhere herein.

[0080] FIGS. 2A-C show the polynucleotide sequence (SEQ ID NO:3) and deduced amino acid sequence (SEQ ID NO:4) of the novel human G-protein coupled receptor, HGPRBMY30_{—}2 of the present invention. The standard one-letter abbreviation for amino acids is used to illustrate the deduced amino acid sequence. The polynucleotide sequence contains a sequence of 2490 nucleotides (SEQ ID NO:3), encoding a polypeptide of 829 amino acids (SEQ ID NO:4). It is anticipated that the HGPRBMY30_{—}2, polypeptide may function as a G-protein coupled receptor as described more particularly elsewhere herein.

[0081] FIGS. 3A-C show the polynucleotide sequence (SEQ ID NO:5) and deduced amino acid sequence (SEQ ID NO:6) of the novel human G-protein coupled receptor, HGPRBMY30_{—}3 of the present invention. The standard one-letter abbreviation for amino acids is used to illustrate the deduced amino acid sequence. The polynucleotide sequence contains a sequence of 2685 nucleotides (SEQ ID NO:5), encoding a polypeptide of 894 amino acids (SEQ ID NO:6). It is anticipated that the HGPRBMY30_{—}3, polypeptide may function as a G-protein coupled receptor as described more particularly elsewhere herein.

[0082] FIGS. 4A-B show the polynucleotide sequence (SEQ ID NO:7) and deduced amino acid sequence (SEQ ID NO:8) of the novel human G-protein coupled receptor, HGPRBMY41_{—}1 of the present invention. The standard one-letter abbreviation for amino acids is used to illustrate the deduced amino acid sequence. The polynucleotide sequence contains a sequence of 2685 nucleotides (SEQ ID NO:7), encoding a polypeptide of 894 amino acids (SEQ ID NO:8). An analysis of the HGPRBMY41_{—}1, polypeptide determined that it comprised the following features: seven transmembrane domains (TM1 to TM7) located from about amino acid 128 to about amino acid 144 (TM1; SEQ ID NO:220); from about amino acid 159 to about amino acid 178 (TM2; SEQ ID NO:221); from about amino acid 194 to about amino acid 215 (TM3; SEQ ID NO:222); from about amino acid 235 to about amino acid 259 (TM4; SEQ ID NO:223); from about amino acid 288 to about amino acid 306 (TM5; SEQ ID NO:224); from about amino acid 336 to about amino acid 357 (TM6; SEQ ID NO:225); and/or from about amino acid 359 to about amino acid 380 (TM7; SEQ ID NO:226) of SEQ ID NO:8 (FIGS. 1A-B) represented by double underlining. It is anticipated that the HGPRBMY41_{—}1, polypeptide may function as a G-protein coupled receptor as described more particularly elsewhere herein.

[0083] FIGS. 5A-B show the polynucleotide sequence (SEQ ID NO:9) and deduced amino acid sequence (SEQ ID NO:10) of the novel human G-protein coupled receptor, HGPRBMY41_{—}2 of the present invention. The standard one-letter abbreviation for amino acids is used to illustrate the deduced amino acid sequence. The polynucleotide sequence contains a sequence of 2685 nucleotides (SEQ ID NO:9), encoding a polypeptide of 894 amino acids (SEQ ID NO:10). An analysis of the HGPRBMY41_{—}2, polypeptide determined that it comprised the following features: seven transmembrane domains (TM1 to TM7) located from about amino acid 277 to about amino acid 293 (TM1; SEQ ID NO:250); from about amino acid 308 to about amino acid 327 (TM2; SEQ ID NO:251); from about amino acid 343 to about amino acid 364 (TM3; SEQ ID NO:252); from about amino acid 384 to about amino acid 408 (TM4; SEQ ID NO:253); from about amino acid 437 to about amino acid 455 (TM5; SEQ ID NO:254); from about amino acid 485 to about amino acid 506 (TM6; SEQ ID NO:255); and/or from about amino acid 508 to about amino acid 529 (TM7; SEQ ID NO:256) of SEQ ID NO:10 (FIGS. 1A-B) represented by double underlining. It is anticipated that the HGPRBMY41_{—}2, polypeptide may function as a G-protein coupled receptor as described more particularly elsewhere herein.

[0084] FIGS. 6A-B show the polynucleotide sequence (SEQ ID NO:11) and deduced amino acid sequence (SEQ ID NO:12) of the novel human G-protein coupled receptor, HGPRBMY41_{—}3 of the present invention. The standard one-letter abbreviation for amino acids is used to illustrate the deduced amino acid sequence. The polynucleotide sequence contains a sequence of 2685 nucleotides (SEQ ID NO:11), encoding a polypeptide of 894 amino acids (SEQ ID NO:12). It is anticipated that the HGPRBMY41_{—}3, polypeptide may function as a G-protein coupled receptor as described more particularly elsewhere herein.

[0085] FIGS. 7A-B show the polynucleotide sequence (SEQ ID NO:13) and deduced amino acid sequence (SEQ ID NO:14) of the novel human G-protein coupled receptor, HGPRBMY42 of the present invention. The standard one-letter abbreviation for amino acids is used to illustrate the deduced amino acid sequence. The polynucleotide sequence contains a sequence of 2685 nucleotides (SEQ ID NO:13), encoding a polypeptide of 894 amino acids (SEQ ID NO:14). An analysis of the HGPRBMY42, polypeptide determined that it comprised the following features: seven transmembrane domains (TM1 to TM7) located from about amino acid 37 to about amino acid 56 (TM1; SEQ ID NO:314); from about amino acid 70 to about amino acid 96 (TM2; SEQ ID NO:315); from about amino acid 102 to about amino acid 127 (TM3; SEQ ID NO:316); from about amino acid 148 to about amino acid 170 (TM4; SEQ ID NO:317); from about amino acid 194 to about amino acid 216 (TM5; SEQ ID NO:318); from about amino acid 400 to about amino acid 418 (TM6; SEQ ID NO:319); and/or from about amino acid 434 to about amino acid 453 (TM7; SEQ ID NO:320) of SEQ ID NO:14 (FIGS. 1A-B) represented by double underlining. It is anticipated that the HGPRBMY42, polypeptide may function as a G-protein coupled receptor as described more particularly elsewhere herein.

[0086] FIGS. 8A-B show the polynucleotide sequence (SEQ ID NO:15) and deduced amino acid sequence (SEQ ID NO:16) of the novel human G-protein coupled receptor, HGPRBMY42_{—}1 of the present invention. The standard one-letter abbreviation for amino acids is used to illustrate the deduced amino acid sequence. The polynucleotide sequence contains a sequence of 2685 nucleotides (SEQ ID NO:15), encoding a polypeptide of 894 amino acids (SEQ ID NO:16). An analysis of the HGPRBMY42_{—}1, polypeptide determined that it comprised the following features: seven transmembrane domains (TM1 to TM7) located from about amino acid 37 to about amino acid 56 (TM 1; SEQ ID NO:354); from about amino acid 70 to about amino acid 96 (TM2; SEQ ID NO:355); from about amino acid 102 to about amino acid 127 (TM3; SEQ ID NO:356); from about amino acid 148 to about amino acid 170 (TM4; SEQ ID NO:357); from about amino acid 194 to about amino acid 216 (TM5; SEQ ID NO:358); from about amino acid 290 to about amino acid 308 (TM6; SEQ ID NO:359); and/or from about amino acid 324 to about amino acid 343 (TM7; SEQ ID NO:360) of SEQ ID NO:16 (FIGS. 1A-B) represented by double underlining. It is anticipated that the HGPRBMY42_{—}1, polypeptide may function as a G-protein coupled receptor as described more particularly elsewhere herein.

[0087] FIGS. 9A-B show the polynucleotide sequence (SEQ ID NO:17) and deduced amino acid sequence (SEQ ID NO:18) of the novel human G-protein coupled receptor, HGPRBMY43 of the present invention. The standard one-letter abbreviation for amino acids is used to illustrate the deduced amino acid sequence. The polynucleotide sequence contains a sequence of 2685 nucleotides (SEQ ID NO:17), encoding a polypeptide of 894 amino acids (SEQ ID NO:18). An analysis of the HGPRBMY43, polypeptide determined that it comprised the following features: seven transmembrane domains (TM1 to TM7) located from about amino acid 101 to about amino acid 120 (TM1; SEQ ID NO:383); from about amino acid 132 to about amino acid 150 (TM2; SEQ ID NO:384); from about amino acid 156 to about amino acid 174 (TM3; SEQ ID NO:385); from about amino acid 205 to about amino acid 226 (TM4; SEQ ID NO:386); from about amino acid 242 to about amino acid 269 (TM5; SEQ ID NO:387); from about amino acid 293 to about amino acid 311 (TM6; SEQ ID NO:388); and/or from about amino acid 318 to about amino acid 340 (TM7; SEQ ID NO:389) of SEQ ID NO:18 (FIGS. 1A-B) represented by double underlining. It is anticipated that the HGPRBMY43, polypeptide may function as a G-protein coupled receptor as described more particularly elsewhere herein.

[0088] FIGS. 10A-D show the polynucleotide sequence (SEQ ID NO:21) and deduced amino acid sequence (SEQ ID NO:22) of the novel human G-protein coupled receptor, HGPRBMY44 of the present invention. The standard one-letter abbreviation for amino acids is used to illustrate the deduced amino acid sequence. The polynucleotide sequence contains a sequence of 2685 nucleotides (SEQ ID NO:21), encoding a polypeptide of 894 amino acids (SEQ ID NO:22).

[0089] FIGS. 11A-K show the regions of identity and similarity between the encoded HGPRBMY30_{—}1 (SEQ ID NO:2), HGPRBMY30_{—}2 (SEQ ID NO:4), and HGPRBMY30_{—}3 (SEQ ID NO:6) proteins to other G-protein coupled receptors, specifically, the bovine parathyroid cell calcium-sensing receptor protein (CASR_BOVIN; SWISS-PROT Accession No: P35384; SEQ ID NO:21); the human parathyroid cell calcium-sensing receptor protein (CASR_HUMAN; SWISS-PROT Accession No: P41180; SEQ ID NO:22); the mouse parathyroid cell calcium-sensing receptor protein (CASR_MOUSE; SWISS-PROT Accession No: Q9QY96; SEQ ID NO:23); the rat parathyroid cell calcium-sensing receptor protein (CASR_RAT; SWISS-PROT Accession No: P48442; SEQ ID NO:24); the human metabotropic glutamate receptor 2 precursor protein (MGR2_HUMAN; SWISS-PROT Accession No: Q14416; SEQ ID NO:25); the rat metabotropic glutamate receptor 2 precursor protein (MGR2_RAT; SWISS-PROT Accession No: P31421; SEQ ID NO:26); the Fugu calcium2+ sensing receptor protein (O73635; SWISS-PROT Accession No: O73635; SEQ ID NO:27); the Fugu pheromone receptor 1 protein (O73636; SWISS-PROT Accession No: O73636; SEQ ID NO:28); the Fugu pheromone receptor 2 protein (O73637; SWISS-PROT Accession No: O73637; SEQ ID NO:29); the Fugu pheromone receptor 3 protein (O73638; SWISS-PROT Accession No: O73638; SEQ ID NO:30); the Fugu pheromone receptor 4 protein (O73639; SWISS-PROT Accession No: O73639; SEQ ID NO:31); the Fugu pheromone receptor 5 protein (O73640; SWISS-PROT Accession No: O73640; SEQ ID NO:32); the goldfish putative odorant receptor 1 protein (O93552; SWISS-PROT Accession No: O93552; SEQ ID NO:33); the goldfish putative odorant receptor 2 protein (O93553; SWISS-PROT Accession No: O93553; SEQ ID NO:34); the mouse putative sweet taste receptor T1R1 protein (Q99PG5; SWISS-PROT Accession No: Q99PG5; SEQ ID NO:35); the mouse putative sweet taste receptor T1R1 protein (Q99PG6; SWISS-PROT Accession No: Q9EQ96; SEQ ID NO:9); the human metabotropic glutamate receptor type 2 protein (Q9H3N6; SWISS-PROT Accession No: Q9H3N6; SEQ ID NO:36); the goldfish odorant receptor 5.24 protein (Q9PW88; SWISS-PROT Accession No: Q9PW88; SEQ ID NO:37); the rat putative taste receptor TR2 protein (Q9Z0R7; SWISS-PROT Accession No: Q9Z0R7; SEQ ID NO:38); and the rat putative taste receptor TR2 protein (Q9Z0R8; SWISS-PROT Accession No: Q9Z0R8; SEQ ID NO:39). The alignment was performed using the CLUSTALW algorithm using default parameters as described herein (Vector NTI suite of programs). The darkly shaded amino acids represent regions of matching identity. The lightly shaded amino acids represent regions of matching similarity. Dots (“•”) between residues indicate gapped regions of non-identity for the aligned polypeptides. The conserved cysteines between HGPRBMY30_{—}1, HGPRBMY30_{—}2, HGPRBMY30_{—}3, and the other GPCRs are noted.

[0090] FIGS. 12A-B show the regions of identity and similarity between the encoded HGPRBMY30 protein (SEQ ID NO:86) with its predicted splice variant proteins HGPRBMY30_{—}1 (SEQ ID NO:2), HGPRBMY30_{—}2 (SEQ ID NO:4), and HGPRBMY30_{—}3 (SEQ ID NO:6) of the present invention. The alignment was performed using the CLUSTALW algorithm using default parameters as described herein (Vector NTI suite of programs). The darkly shaded amino acids represent regions of matching identity. The lightly shaded amino acids represent regions of matching similarity. Dots (“•”) between residues indicate gapped regions of non-identity for the aligned polypeptides.

[0091] FIG. 13 shows the regions of local identity and similarity between the encoded HGPRBMY30_{—}1 protein (SEQ ID NO:2) to the Pfam 7TM_{—}3 metabotropic glutamate family consensus model sequence (7tm_{—}3; Pfam Accession No: PF00003), in addition to the Pfam ANF_receptor consensus model sequence (ANF_receptor; Pfam Accession No: PF01094). The query (“Q”) sequence represents the local matching sequence of the HGPRBMY30_{—}1 protein (SEQ ID NO:2), whereas the target (“T”) represents either the human Pfam 7TM_{—}3 metabotropic glutamate family consensus model sequence or the ANF_receptor consensus model sequence. The alignment was performed using the BLAST2 algorithm according to default parameters (S F Altschul, et al., Nucleic Acids Res 25:3389-3402, 1997). The amino acids between the query and target sequences represent matching identical amino acids between the two sequences. Plus signs (“+”) between the query and target sequences represent similar amino acids between the two sequences. Dots (“•”) between the query and target sequences indicate regions of non-identity for the aligned polypeptides. The conserved cysteines between HGPRBMY30_{—}1 and the consensus metabotropic glutamate family polypeptide sequence and the consensus ANF_receptor polypeptide sequence are noted.

[0092] FIG. 14 shows the regions of local identity and similarity between the encoded HGPRBMY30_{—}2 protein (SEQ ID NO:4) to the Pfam 7TM_{—}3 metabotropic glutamate family consensus model sequence (7tm_{—}3; Pfam Accession No:PF00003), in addition to the Pfam ANF_receptor consensus model sequence (ANF_receptor; Pfam Accession No: PF01094). The query (“Q”) sequence represents the local matching sequence of the HGPRBMY30_{—}2 protein (SEQ ID NO:4), whereas the target (“T”) represents either the human Pfam 7TM_{—}3 metabotropic glutamate family consensus model sequence or the ANF_receptor consensus model sequence. The alignment was performed using the BLAST2 algorithm according to default parameters (S F Altschul, et al., Nucleic Acids Res 25:3389-3402, 1997). The amino acids between the query and target sequences represent matching identical amino acids between the two sequences. Plus signs (“+”) between the query and target sequences represent similar amino acids between the two sequences. Dots (“•”) between the query and target sequences indicate regions of non-identity for the aligned polypeptides. The conserved cysteines between HGPRBMY30_{—}2 and the consensus metabotropic glutamate family polypeptide sequence and the consensus ANF_receptor polypeptide sequence are noted.

[0093] FIG. 15 shows the regions of local identity and similarity between the encoded HGPRBMY30_{—}3 protein (SEQ ID NO:6) to the Pfam 7TM_{—}3 metabotropic glutamate family consensus model sequence (7tm_{—}3; Pfam Accession No:PF00003), in addition to the Pfam ANF_receptor consensus model sequence (ANF_receptor; Pfam Accession No: PF01094). The query (“Q”) sequence represents the local matching sequence of the HGPRBMY30_{—}3 protein (SEQ ID NO:6), whereas the target (“T”) represents either the human Pfam 7TM_{—}3 metabotropic glutamate family consensus model sequence or the ANF_receptor consensus model sequence. The alignment was performed using the BLAST2 algorithm according to default parameters (S F Altschul, et al., Nucleic Acids Res 25:3389-3402, 1997). The amino acids between the query and target sequences represent matching identical amino acids between the two sequences. Plus signs (“+”) between the query and target sequences represent similar amino acids between the two sequences. Dots (“•”) between the query and target sequences indicate regions of non-identity for the aligned polypeptides. The conserved cysteines between HGPRBMY30_{—}3 and the consensus metabotropic glutamate family polypeptide sequence and the consensus ANF_receptor polypeptide sequence are noted.

[0094] FIG. 16 shows an expression profile of the novel human G-protein coupled receptor, HGPRBMY30. As shown, transcripts corresponding to HGPRBMY30 expressed highly in the testis; significantly in the heart, pituitary gland, lymph node, and to a lesser extent, in kidney, spleen, pancreas, small intestine, thymus, lung, spinal cord, bone marrow, brain, and prostate. Expression data was obtained by measuring the steady state HGPRBMY30 mRNA levels by quantitative PCR using the PCR primer pair provided as SEQ ID NO:87 and 88 as described herein. The expression patterns of the HGPRBMY30 splice variants HGPRBMY30_{—}1 (SEQ ID NO:2), HGPRBMY30_{—}2 (SEQ ID NO:4), and HGPRBMY30_{—}3 (SEQ ID NO:6) of the present invention are expected to be similar to the expression pattern of HGPRBMY30.

[0095] FIG. 17 shows a table illustrating the percent identity and percent similarity between the HGPRBMY30_{—}1, HGPRBMY30_{—}2, and HGPRBMY30_{—}3 polypeptides of the present invention with other G-protein coupled receptors. The percent identity and percent similarity values were determined using the Gap algorithm using default parameters (Genetics Computer Group suite of programs; Needleman and Wunsch. J. Mol. Biol. 48; 443-453, 1970); GAP parameters: gap creation penalty: 6 and gap extension penalty: 2).

[0096] FIGS. 18A-C show the regions of identity and similarity between the encoded HGPRBMY41_{—}1 (SEQ ID NO:8), HGPRBMY41_{—}2 (SEQ ID NO:10), and HGPRBMY41_{—}3 (SEQ ID NO:12) proteins to other G-protein coupled receptors, specifically, the human TM7XN1 protein precursor protein (O95966; SWISS-PROT Accession No: O95966; SEQ ID NO:40); the human putative G-protein-coupled receptor protein (Q9Y653; SWISS-PROT Accession No: Q9Y653; SEQ ID NO:41); the mouse serpentine receptor protein (Q9QZT2; SWISS-PROT Accession No: Q9QZT2; SEQ ID NO:42); the human DJ287G14.2 G-protein-coupled receptor protein (Q9Y3K0; SWISS-PROT Accession No: Q9Y3K0; SEQ ID NO:43); and the human EGF-like module EMR2 protein (Q9UHX3; SWISS-PROT Accession No: Q9UHX3; SEQ ID NO:44).

[0097] FIG. 19 shows the regions of identity and similarity between the encoded HGPRBMY41_{—}1 protein of the present invention (SEQ ID NO:8) with its predicted splice variant proteins HGPRBMY41_{—}2 (SEQ ID NO:10), HGPRBMY41_{—}3 (SEQ ID NO:12) of the present invention. The alignment was performed using the CLUSTALW algorithm using default parameters as described herein (Vector NTI suite of programs). The darkly shaded amino acids represent regions of matching identity. The lightly shaded amino acids represent regions of matching similarity. Dots (“•”) between residues indicate gapped regions of non-identity for the aligned polypeptides.

[0098] FIG. 20 shows the regions of local identity and similarity between the encoded HGPRBMY41_{—}1 protein (SEQ ID NO:8) to the Pfam 7TM_{—}2 Secretin family family consensus model sequence (7tm_{—}2; Pfam Accession No:PF00002), in addition to the Pfam Latrophilin/CL-1-like GPS domain consensus model sequence (GPS; Pfam Accession No: PF01825). The query (“Q”) sequence represents the local matching sequence of the HGPRBMY41_{—}1 protein (SEQ ID NO:8), whereas the target (“T”) represents either the human Pfam 7TM_{—}2 Secretin family consensus model sequence or the Pfam Latrophilin/CL-1-like GPS domain consensus model sequence. The alignment was performed using the BLAST2 algorithm according to default parameters (S F Altschul, et al., Nucleic Acids Res 25:3389-3402, 1997). The amino acids between the query and target sequences represent matching identical amino acids between the two sequences. Plus signs (“+”) between the query and target sequences represent similar amino acids between the two sequences. Dots (“•”) between the query and target sequences indicate regions of non-identity for the aligned polypeptides. The conserved cysteines between HGPRBMY41_{—}1 and the consensus Secretin family polypeptide sequence and the consensus GPS polypeptide sequence are noted.

[0099] FIG. 21 shows the regions of local identity and similarity between the encoded HGPRBMY41_{—}2 protein (SEQ ID NO:10) to the Pfam 7TM_{—}2 Secretin family family consensus model sequence (7tm_{—}2; Pfam Accession No:PF00002). The query (“Q”) sequence represents the local matching sequence of the HGPRBMY41_{—}2 protein (SEQ ID NO:10), whereas the target (“T”) represents the human Pfam 7TM_{—}2 Secretin family consensus model sequence. The alignment was performed using the BLAST2 algorithm according to default parameters (S F Altschul, et al., Nucleic Acids Res 25:3389-3402, 1997). The amino acids between the query and target sequences represent matching identical amino acids between the two sequences. Plus signs (“+”) between the query and target sequences represent similar amino acids between the two sequences. Dots (“•”) between the query and target sequences indicate regions of non-identity for the aligned polypeptides. The conserved cysteines between HGPRBMY41_{—}2 and the consensus Secretin family polypeptide sequence are noted.

[0100] FIG. 22 shows the regions of local identity and similarity between the encoded HGPRBMY41_{—}3 protein (SEQ ID NO:12) to the Pfam Latrophilin/CL-1-like GPS domain consensus model sequence (GPS; Pfam Accession No: PF01825). The query (“Q”) sequence represents the local matching sequence of the HGPRBMY41_{—}3 protein (SEQ ID NO:12), whereas the target (“T”) represents the Pfam Latrophilin/CL-1-like GPS domain consensus model sequence. The alignment was performed using the BLAST2 algorithm according to default parameters (S F Altschul, et al., Nucleic Acids Res 25:3389-3402, 1997). The amino acids between the query and target sequences represent matching identical amino acids between the two sequences. Plus signs (“+”) between the query and target sequences represent similar amino acids between the two sequences. Dots (“•”) between the query and target sequences indicate regions of non-identity for the aligned polypeptides. The conserved cysteines between HGPRBMY41_{—}3 and the GPS polypeptide sequence are noted.

[0101] FIG. 23 shows an expression profile of the novel human G-protein coupled receptor, HGPRBMY41_{—}1. As shown, transcripts corresponding to HGPRBMY41_{—}1 expressed predominately in the bone marrow; significantly in the lung, spleen, and to a lesser extent, in other tissues as shown. Expression data was obtained by measuring the steady state HGPRBMY41_{—}1 mRNA levels by quantitative PCR using the PCR primer pair provided as SEQ ID NO:89 and 90 as described herein. The expression patterns of the HGPRBMY41_{—}1 splice variants HGPRBMY41_{—}2 (SEQ ID NO:10), and HGPRBMY41_{—}3 (SEQ ID NO:12) of the present invention are expected to be similar to the expression pattern of HGPRBMY41_{—}1.

[0102] FIG. 24 shows a table illustrating the percent identity and percent similarity between the HGPRBMY41_{—}1, HGPRBMY41_{—}2, and HGPRBMY41_{—}3 polypeptides of the present invention with other G-protein coupled receptors. The percent identity and percent similarity values were determined using the Gap algorithm using default parameters (Genetics Computer Group suite of programs; Needleman and Wunsch. J. Mol. Biol. 48; 443-453, 1970); GAP parameters: gap creation penalty: 6 and gap extension penalty: 2).

[0103] FIGS. 25A-C show the regions of identity and similarity between the encoded HGPRBMY42 (SEQ ID NO:14), and HGPRBMY42_{—}1 (SEQ ID NO:16) proteins to other G-protein coupled receptors, specifically, the mouse Alpha-1A adrenergic receptor protein (A1AA_MOUSE; SWISS-PROT Accession No: P97718; SEQ ID NO:45); the rat Alpha-1A adrenergic receptor protein (A1AA_RAT; SWISS-PROT Accession No: P43140; SEQ ID NO:46); the human Alpha-1A adrenergic receptor protein (A1AA_HUMAN; SWISS-PROT Accession No: P35348; SEQ ID NO:47); the human alpha adrenergic receptor subtype alpha 1C protein (Q9UD63; SWISS-PROT Accession No: Q9UD63; SEQ ID NO:48); the guinea pig Alpha-1A adrenergic receptor protein (A1AA_CAVPO; SWISS-PROT Accession No: Q9WU25; SEQ ID NO:49); the rabbit alpha 1a-adrenoceptor isoform 2 protein (Q9MZU3; SWISS-PROT Accession No: Q9MZU3; SEQ ID NO:50); the bovine Alpha-1A adrenergic receptor protein (A1AA_BOVIN; SWISS-PROT Accession No: P18130; SEQ ID NO:51); the oryla Alpha-1A adrenergic receptor protein (A1AA_ORYLA; SWISS-PROT Accession No: Q91175; SEQ ID NO:52); the amphioxus dopamine D1/beta receptor protein (O96716; SWISS-PROT Accession No: O96716; SEQ ID NO:53); the Fugu 5-hydroxytryptamine 1A-alpha receptor protein (5H1A_FUGRU; SWISS-PROT Accession No: O42385; SEQ ID NO:54); and the Human G-protein coupled receptor RE2 protein (O75963; SWISS-PROT Accession No: O75963; SEQ ID NO:55).

[0104] FIG. 26 show the regions of identity and similarity between the encoded HGPRBMY42 protein of the present invention (SEQ ID NO:14) with its predicted splice variant protein HGPRBMY42_{—}1 (SEQ ID NO: 16) of the present invention. The alignment was performed using the CLUSTALW algorithm using default parameters as described herein (Vector NTI suite of programs). The darkly shaded amino acids represent regions of matching identity. The lightly shaded amino acids represent regions of matching similarity. Dots (“•”) between residues indicate gapped regions of non-identity for the aligned polypeptides.

[0105] FIG. 27 shows the regions of local identity and similarity between the encoded HGPRBMY42 protein (SEQ ID NO:14) to the Pfam Secretin family consensus model sequence (7tm_{—}2; Pfam Accession No: PF00002). The query (“Q”) sequence represents the local matching sequence of the HGPRBMY42 protein (SEQ ID NO:14), whereas the target (“T”) represents the Pfam Secretin family consensus model sequence. The alignment was performed using the BLAST2 algorithm according to default parameters (S F Altschul, et al., Nucleic Acids Res 25:3389-3402, 1997). The amino acids between the query and target sequences represent matching identical amino acids between the two sequences. Plus signs (“+”) between the query and target sequences represent similar amino acids between the two sequences. Dots (“•”) between the query and target sequences indicate regions of non-identity for the aligned polypeptides. The conserved cysteines between HGPRBMY42 and the consensus Secretin family polypeptide sequence are noted.

[0106] FIG. 28 shows the regions of local identity and similarity between the encoded HGPRBMY42_{—}1 protein (SEQ ID NO:16) to the Pfam Secretin family consensus model sequence (7tm_{—}2; Pfam Accession No: PF00002). The query (“Q”) sequence represents the local matching sequence of the HGPRBMY42_{—}1 protein (SEQ ID NO:16), whereas the target (“T”) represents the Pfam Secretin family consensus model sequence. The alignment was performed using the BLAST2 algorithm according to default parameters (S F Altschul, et al., Nucleic Acids Res 25:3389-3402, 1997). The amino acids between the query and target sequences represent matching identical amino acids between the two sequences. Plus signs (“+”) between the query and target sequences represent similar amino acids between the two sequences. Dots (“•”) between the query and target sequences indicate regions of non-identity for the aligned polypeptides. The conserved cysteines between HGPRBMY42_{—}1 and the consensus Secretin family polypeptide sequence are noted.

[0107] FIG. 29 shows an expression profile of the novel human G-protein coupled receptor, HGPRBMY42. As shown, transcripts corresponding to HGPRBMY42 expressed predominately in the brain and spinal cord, and to a lesser extent, in other tissues as shown. Expression data was obtained by measuring the steady state HGPRBMY42 mRNA levels by quantitative PCR using the PCR primer pair provided as SEQ ID NO:91 and 92 as described herein. The expression patterns of the HGPRBMY42 splice variant HGPRBMY42_{—}1 (SEQ ID NO:16) of the present invention are expected to be similar to the expression pattern of HGPRBMY42.

[0108] FIGS. 30A-B show a table illustrating the percent identity and percent similarity between the HGPRBMY42, and HGPRBMY42_{—}1 polypeptides of the present invention with other G-protein coupled receptors. The percent identity and percent similarity values were determined using the Gap algorithm using default parameters (Genetics Computer Group suite of programs; Needleman and Wunsch. J. Mol. Biol. 48; 443-453, 1970); GAP parameters: gap creation penalty: 6 and gap extension penalty: 2).

[0109] FIGS. 31A-F show the regions of identity and similarity between the encoded HGPRBMY43 (SEQ ID NO:18) protein to other G-protein coupled receptors, specifically, the human leucocyte antigen CD97 precursor protein (CD97_HUMAN; SWISS-PROT Accession No: P48960; SEQ ID NO:56); the human CD97 protein (000718; SWISS-PROT Accession No: 000718; SEQ ID NO:57); the mouse CD97 antigen protein (Q9JLQ8; SWISS-PROT Accession No: Q9JLQ8; SEQ ID NO:58); the mouse leucocyte antigen CD97 precursor protein (Q9Z0M6; SWISS-PROT Accession No: Q9Z0M6; SEQ ID NO:59); the human EMR1 hormone receptor protein (EMR1_HUMAN; SWISS-PROT Accession No: Q14246; SEQ ID NO:60); the mouse EMR1 hormone receptor protein (EMR1_MOUSE; SWISS-PROT Accession No: Q61549; SEQ ID NO:61); the human EGF-like module EMR2 protein (Q9UHX3; SWISS-PROT Accession No: Q9UHX3; SEQ ID NO:62); the human R29368_{—}2 protein (Q9Y4B 1; SWISS-PROT Accession No: Q9Y4B 1; SEQ ID NO:63); the human FLJ000015 protein (Q9H7Q2; SWISS-PROT Accession No: Q9H7Q2; SEQ ID NO:64); the human EGF-like module-containing mucin-like receptor EMR3 protein (Q9BY15; SWISS-PROT Accession No: Q9BY15; SEQ ID NO:65); and the human KIAA0768 protein (O94867; SWISS-PROT Accession No: O94867; SEQ ID NO:66). The alignment was performed using the CLUSTALW algorithm using default parameters as described herein. (Vector NTI suite of programs). The darkly shaded amino acids represent regions of matching identity. The lightly shaded amino acids represent regions of matching similarity. Dots (“•”) between residues indicate gapped regions of non-identity for the aligned polypeptides. The conserved cysteines between HGPRBMY43 and the other GPCRs are noted.

[0110] FIG. 32 shows the regions of local identity and similarity between the encoded HGPRBMY43 protein (SEQ ID NO:18) to the Pfam 7TM_{—}2 Secretin family family consensus model sequence (7tm_{—}2; Pfam Accession No:PF00002), in addition to the Pfam Latrophilin/CL-1-like GPS domain consensus model sequence (GPS; Pfam Accession No: PF01825). The query (“Q”) sequence represents the local matching sequence of the HGPRBMY43 protein (SEQ ID NO:18), whereas the target (“T”) represents either the human Pfam 7TM_{—}2 Secretin family consensus model sequence or the Pfam Latrophilin/CL-1-like GPS domain consensus model sequence. The alignment was performed using the BLAST2 algorithm according to default parameters (S F Altschul, et al., Nucleic Acids Res 25:3389-3402, 1997). The amino acids between the query and target sequences represent matching identical amino acids between the two sequences. Plus signs (“+”) between the query and target sequences represent similar amino acids between the two sequences. Dots (“•”) between the query and target sequences indicate regions of non-identity for the aligned polypeptides. The conserved cysteines between HGPRBMY43 and the consensus Secretin family polypeptide sequence and the consensus GPS polypeptide sequence are noted.

[0111] FIG. 33 shows an expression profile of the novel human G-protein coupled receptor, HGPRBMY43. As shown, transcripts corresponding to HGPRBMY43 expressed predominately in the lymph node, spleen; significantly in testis, bone marrow, small intestine, and to a lesser extent, in other tissues as shown. Expression data was obtained by measuring the steady state HGPRBMY43 mRNA levels by quantitative PCR using the PCR primer pair provided as SEQ ID NO:93 and 94 as described herein.

[0112] FIG. 34 shows a table illustrating the percent identity and percent similarity between the HGPRBMY43 polypeptide of the present invention with other G-protein coupled receptors. The percent identity and percent similarity values were determined using the Gap algorithm using default parameters (Genetics Computer Group suite of programs; Needleman and Wunsch. J. Mol. Biol. 48; 443-453, 1970); GAP parameters: gap creation penalty: 6 and gap extension penalty: 2).

[0113] FIGS. 35A-J show the regions of identity and similarity between the encoded HGPRBMY44 (SEQ ID NO:20) protein to other G-protein coupled receptors, specifically, the mouse putative sweet taste receptor T1R1 protein (Q99PG5; SWISS-PROT Accession No: Q99PG5; SEQ ID NO:67); the mouse putative sweet taste receptor T1R1-b protein (Q99PG6; SWISS-PROT Accession No: Q99PG6; SEQ ID NO:68); the rat putative taste receptor TR1 protein (Q9Z0R8; SWISS-PROT Accession No: Q9Z0R8; SEQ ID NO:69); the rat putative taste receptor TR2 protein (Q9Z0R7; SWISS-PROT Accession No: Q9Z0R7; SEQ ID NO:70); the goldfish odorant receptor 5.24 protein (Q9PW88; SWISS-PROT Accession No: Q14416; SEQ ID NO:71); the mouse parathyroid cell calcium-sensing receptor protein (CASR_MOUSE; SWISS-PROT Accession No: Q9QY96; SEQ ID NO:72); the rat parathyroid cell calcium-sensing receptor protein (CASR_RAT; SWISS-PROT Accession No: P48442; SEQ ID NO:73); the human parathyroid cell calcium-sensing receptor protein (CASR_HUMAN; SWISS-PROT Accession No: P41180; SEQ ID NO:74); the bovine parathyroid cell calcium-sensing receptor protein (CASR_BOVIN; SWISS-PROT Accession No: P35384; SEQ ID NO:75); the Fugu calcium2+ sensing receptor protein (O73635; SWISS-PROT Accession No: O73635; SEQ ID NO:76); the goldfish putative odorant receptor protein (O93552; SWISS-PROT Accession No: O93552; SEQ ID NO:77); the goldfish putative odorant receptor 2 protein (O93553; SWISS-PROT Accession No: O93553; SEQ ID NO:78); the fugu pheromone receptor protein (O73638; SWISS-PROT Accession No: O73638; SEQ ID NO:79); the fugu pheromone receptor 2 protein (O73636; SWISS-PROT Accession No: O73636; SEQ ID NO:80); the fugu pheromone receptor 3 protein (O73639; SWISS-PROT Accession No: O73639; SEQ ID NO:81); the fugu pheromone receptor 4 protein (O73637; SWISS-PROT Accession No: O73637; SEQ ID NO:82); the fugu pheromone receptor 5 protein (O73640; SWISS-PROT Accession No: O73640; SEQ ID NO:83); the mouse putative pheromone receptor V2R2 protein (O70410; SWISS-PROT Accession No: O70410; SEQ ID NO:84); and the human metabotropic glutamate receptor type 2 protein (Q9H3N6; SWISS-PROT Accession No: Q9Z0R8; SEQ ID NO:85). The alignment was performed using the CLUSTALW algorithm using default parameters as described herein (Vector NTI suite of programs). The darkly shaded amino acids represent regions of matching identity. The lightly shaded amino acids represent regions of matching similarity. Dots (“•”) between residues indicate gapped regions of non-identity for the aligned polypeptides. The conserved cysteines between HGPRBMY44 and the other GPCRs are noted.

[0114] FIG. 36 shows the regions of local identity and similarity between the encoded HGPRBMY44 protein (SEQ ID NO:20) to the Pfam 7TM_{—}3 metabotropic glutamate family consensus model sequence (7tm_{—}3; Pfam Accession No:PF00003), in addition to the Pfam ANF_receptor consensus model sequence (ANF_receptor; Pfam Accession No: PF01094). The query (“Q”) sequence represents the local matching sequence of the HGPRBMY44 protein (SEQ ID NO:20), whereas the target (“T”) represents either the human Pfam 7TM_{—}3 metabotropic glutamate family consensus model sequence or the ANF_receptor consensus model sequence. The alignment was performed using the BLAST2 algorithm according to default parameters (S F Altschul, et al., Nucleic Acids Res 25:3389-3402, 1997). The amino acids between the query and target sequences represent matching identical amino acids between the two sequences. Plus signs (“+”) between the query and target sequences represent similar amino acids between the two sequences. Dots (“•”) between the query and target sequences indicate regions of non-identity for the aligned polypeptides. The conserved cysteines between HGPRBMY44 and the consensus metabotropic glutamate family polypeptide sequence and the consensus ANF_receptor polypeptide sequence are noted.

[0115] FIG. 37 shows an expression profile of the novel human G-protein coupled receptor, HGPRBMY44. As shown, transcripts corresponding to HGPRBMY44 expressed predominately in the testis, prostate, kidney, and to a lesser extent, in other tissues as shown. Expression data was obtained by measuring the steady state HGPRBMY44 mRNA levels by quantitative PCR using the PCR primer pair provided as SEQ ID NO:95 and 96 as described herein.

[0116] FIG. 38 shows a table illustrating the percent identity and percent similarity between the HGPRBMY44 polypeptide of the present invention with other G-protein coupled receptors. The percent identity and percent similarity values were determined using the Gap algorithm using default parameters (Genetics Computer Group suite of programs; Needleman and Wunsch. J. Mol. Biol. 48; 443-453, 1970); GAP parameters: gap creation penalty: 6 and gap extension penalty: 2).

[0117] FIG. 39 shows an expanded expression profile of the novel human G-protein coupled receptor, HGPRBMY41_{—}1. The figure illustrates the relative expression level of HGPRBMY41_{—}1 amongst various mRNA tissue sources. As shown, the HGPRBMY41_{—}1 polypeptide was expressed predominately in the spleen, mononuclear cells, cerebral blood vessel, the ileum and the trachea. Expression of HGPRBMY41_{—}1 was, in general, extremely low in the brain and was completely absent from the medulla oblongata and parietal cortex. Expression data was obtained by measuring the steady state HGPRBMY41_{—}1 mRNA levels by quantitative PCR using the PCR primer pair provided as SEQ ID NO:466 and 467, and Taqman probe (SEQ ID NO:468) as described in Example 6 herein.

[0118] FIG. 40 shows an expanded expression profile of the novel human G-protein coupled receptor, HGPRBMY41_{—}1, of the present invention. The figure illustrates the relative expression level of HGPRBMY41_{—}1 amongst various mRNA tissue sources isolated from normal and tumor tissues. As shown, the HGPRBMY41_{—}1 polypeptide was differentially expressed in ovarian tumor, stomach tumor, colon tumor, and kidney tumor tissue compared to each respective normal tissue. Expression data was obtained by measuring the steady state HGPRBMY41_{—}1 mRNA levels by quantitative PCR using the PCR primer pair provided as SEQ ID NO:466 and 467, and Taqman probe (SEQ ID NO:468) as described in Example 6 herein.

[0119] FIG. 41 shows an expanded expression profile of the novel human G-protein coupled receptor, HGPRBMY43. The figure illustrates the relative expression level of HGPRBMY43 amongst various mRNA tissue sources. As shown, the HGPRBMY43 polypeptide was expressed predominately in the testis, spleen, and the lower gastrointestinal tract. HGPRBMY43 was also significantly expressed in lung parenchyma, and the tonsil. Expression data was obtained by measuring the steady state HGPRBMY43 mRNA levels by quantitative PCR using the PCR primer pair provided as SEQ ID NO:469 and 470, and Taqman probe (SEQ ID NO:471) as described in Example 6 herein.

[0120] Table I provides a summary of the novel polypeptides and their encoding polynucleotides of the present invention.

[0121] Table II illustrates the preferred hybridization conditions for the polynucleotides of the present invention. Other hybridization conditions may be known in the art or are described elsewhere herein.

[0122] Table III provides a summary of various conservative substitutions encompassed by the present invention.

### DETAILED DESCRIPTION OF THE INVENTION

[0123] The present invention may be understood more readily by reference to the following detailed description of the preferred embodiments of the invention and the Examples included herein.

[0124] The invention provides novel human sequences that encode G-protein coupled receptors (GPCRs) and splice variants thereof with substantial homology to the class of GPCRs known as class 2 Secretin family GPCRs and/or class 3 metabotropic glutamate family GPCRs. Such receptors have been implicated in a number of diseases and/or disorders, which are known in the art or described herein.

[0125] In the present invention, “isolated” refers to material removed from its original environment (e.g., the natural environment if it is naturally occurring), and thus is altered “by the hand of man” from its natural state. For example, an isolated polynucleotide could be part of a vector or a composition of matter, or could be contained within a cell, and still be “isolated” because that vector, composition of matter, or particular cell is not the original environment of the polynucleotide. The term “isolated” does not refer to genomic or cDNA libraries, whole cell total or mRNA preparations, genomic DNA preparations (including those separated by electrophoresis and transferred onto blots), sheared whole cell genomic DNA preparations or other compositions where the art demonstrates no distinguishing features of the polynucleotide/sequences of the present invention.

[0126] In specific embodiments, the polynucleotides of the invention are at least 15, at least 30, at least 50, at least 100, at least 125, at least 500, or at least 1000 continuous nucleotides but are less than or equal to 300 kb, 200 kb, 100 kb, 50 kb, 15 kb, 10 kb, 7.5 kb, 5 kb, 2.5 kb, 2.0 kb, or 1 kb, in length. In a further embodiment, polynucleotides of the invention comprise a portion of the coding sequences, as disclosed herein, but do not comprise all or a portion of any intron. In another embodiment, the polynucleotides comprising coding sequences do not contain coding sequences of a genomic flanking gene (i.e., 5′ or 3′ to the gene of interest in the genome). In other embodiments, the polynucleotides of the invention do not contain the coding sequence of more than 1000, 500, 250, 100, 50, 25, 20, 15, 10, 5, 4, 3, 2, or 1 genomic flanking gene(s).

[0127] As used herein, a “polynucleotide” refers to a molecule having a nucleic acid sequence contained in SEQ ID NO:1, SEQ ID NO:3, SEQ ID NO:5, SEQ ID NO:7, SEQ ID NO:9, SEQ ID NO:11, SEQ ID NO:13, SEQ ID NO:15, SEQ ID NO:17, and/or SEQ ID NO:19, or the cDNA contained within the clone deposited with the ATCC. For example, the polynucleotide can contain the nucleotide sequence of the full length cDNA sequence, including the 5′ and 3′ untranslated sequences, the coding region, with or without a signal sequence, the secreted protein coding region, as well as fragments, epitopes, domains, and variants of the nucleic acid sequence. Moreover, as used herein, a “polypeptide” refers to a molecule having the translated amino acid sequence generated from the polynucleotide as broadly defined.

[0128] In the present invention, the full length sequence identified as SEQ ID NO:1, SEQ ID NO:3, SEQ ID NO:5, SEQ ID NO:7, SEQ ID NO:9, SEQ ID NO:11, SEQ ID NO:13, SEQ ID NO:15, SEQ ID NO:17, and/or SEQ ID NO:19 was often generated by overlapping sequences contained in one or more clones (contig analysis). A representative clone containing all or most of the sequence for SEQ ID NO: 1, SEQ ID NO:3, SEQ ID NO:5, SEQ ID NO:7, SEQ ID NO:9, SEQ ID NO:11, SEQ ID NO:13, SEQ ID NO:15, SEQ ID NO:17, and/or SEQ ID NO:19 was deposited with the American Type Culture Collection (“ATCC”). As shown in Table I, each clone is identified by a cDNA Clone ID (Identifier) and the ATCC Deposit Number. The ATCC is located at 10801 University Boulevard, Manassas, Va. 20110-2209, U.S.A. The ATCC deposit was made pursuant to the terms of the Budapest Treaty on the international recognition of the deposit of microorganisms for purposes of patent procedure. The deposited clone is inserted in the pSport1 (Life Technologies) using the NotI and SalI restriction endonuclease sites as described herein.

[0129] Unless otherwise indicated, all nucleotide sequences determined by sequencing a DNA molecule herein were determined using an automated DNA sequencer (such as the Model 373, preferably a Model 3700, from Applied Biosystems, Inc.), and all amino acid sequences of polypeptides encoded by DNA molecules determined herein were predicted by translation of a DNA sequence determined above. Therefore, as is known in the art for any DNA sequence determined by this automated approach, any nucleotide sequence determined herein may contain some errors. Nucleotide sequences determined by automation are typically at least about 90% identical, more typically at least about 95% to at least about 99.9% identical to the actual nucleotide sequence of the sequenced DNA molecule. The actual sequence can be more precisely determined by other approaches including manual DNA sequencing methods well known in the art. As is also known in the art, a single insertion or deletion in a determined nucleotide sequence compared to the actual sequence will cause a frame shift in translation of the nucleotide sequence such that the predicted amino acid sequence encoded by a determined nucleotide sequence will be completely different from the amino acid sequence actually encoded by the sequenced DNA molecule, beginning at the point of such an insertion or deletion.

[0130] Using the information provided herein, such as the nucleotide sequence in FIGS. 1A-C (SEQ ID NO:1, FIGS. 2A-C (SEQ ID NO:3), FIGS. 3A-C (SEQ ID NO:5), FIGS. 4A-B (SEQ ID NO:7), FIGS. 5A-B (SEQ ID NO:9), FIGS. 6A-B (SEQ ID NO:11), FIGS. 7A-B (SEQ ID NO:13), FIGS. 8A-B (SEQ ID NO:15), FIGS. 9A-B (SEQ ID NO:17), and/or FIGS. 10A-D (SEQ ID NO:19), a nucleic acid molecule of the present invention encoding the HGPRBMY30_{—}1, HGPRBMY30_{—}2, HGPRBMY30_{—}3, HGPRBMY41_{—}1, HGPRBMY41_{—}2, HGPRBMY41_{—}3, HGPRBMY42, HGPRBMY42_{—}1, HGPRBMY43, and/or HGPRBMY44 polypeptide may be obtained using standard cloning and screening procedures, such as those for cloning cDNAs using mRNA as starting material. Illustrative of the invention, the nucleic acid molecules described in FIGS. 1A-C (SEQ ID NO:1, FIGS. 2A-C (SEQ ID NO:3), FIGS. 3A-C (SEQ ID NO:5), FIGS. 4A-B (SEQ ID NO:7), FIGS. 5A-B (SEQ ID NO:9), FIGS. 6A-B (SEQ ID NO:11), FIGS. 7A-B (SEQ ID NO:13), FIGS. 8A-B (SEQ ID NO:15), FIGS. 9A-B (SEQ ID NO:17), and/or FIGS. 10A-D (SEQ ID NO:19) were discovered in a mixture of human circular brain and testis first strand cDNA library.

[0131] A “polynucleotide” of the present invention also includes those polynucleotides capable of hybridizing, under stringent hybridization conditions, to sequences contained in SEQ ID NO:1, SEQ ID NO:3, SEQ ID NO:5, SEQ ID NO:7, SEQ ID NO:9, SEQ ID NO:11, SEQ ID NO:13, SEQ ID NO:15, SEQ ID NO:17, and/or SEQ ID NO:19, the complement thereof, or the cDNA within the clone deposited with the ATCC. “Stringent hybridization conditions” refers to an overnight incubation at 42 degree C in a solution comprising 50% formamide, 5× SSC (750 mM NaCl, 75 mM trisodium citrate), 50 mM sodium phosphate (pH 7.6), 5× Denhardt's solution, 10% dextran sulfate, and 20 μg/ml denatured, sheared salmon sperm DNA, followed by washing the filters in 0.1× SSC at about 65 degree C.

[0132] Also contemplated are nucleic acid molecules that hybridize to the polynucleotides of the present invention at lower stringency hybridization conditions. Changes in the stringency of hybridization and signal detection are primarily accomplished through the manipulation of formamide concentration (lower percentages of formamide result in lowered stringency); salt conditions, or temperature. For example, lower stringency conditions include an overnight incubation at 37 degree C. in a solution comprising 6× SSPE (20× SSPE=3M NaCl; 0.2M NaH2PO4; 0.02M EDTA, pH 7.4), 0.5% SDS, 30% formamide, 100 μg/ml salmon sperm blocking DNA; followed by washes at 50 degree C. with 1× SSPE, 0.1% SDS. In addition, to achieve even lower stringency, washes performed following stringent hybridization can be done at higher salt concentrations (e.g. 5× SSC).

[0133] Note that variations in the above conditions may be accomplished through the inclusion and/or substitution of alternate blocking reagents used to suppress background in hybridization experiments. Typical blocking reagents include Denhardt's reagent, BLOTTO, heparin, denatured salmon sperm DNA, and commercially available proprietary formulations. The inclusion of specific blocking reagents may require modification of the hybridization conditions described above, due to problems with compatibility.

[0134] Of course, a polynucleotide which hybridizes only to polyA+ sequences (such as any 3′ terminal polyA+ tract of a cDNA shown in the sequence listing), or to a complementary stretch of T (or U) residues, would not be included in the definition of “polynucleotide” since such a polynucleotide would hybridize to any nucleic acid molecule containing a poly (A) stretch or the complement thereof (e.g., practically any double-stranded cDNA clone generated using oligo dT as a primer).

[0135] The polynucleotide of the present invention can be composed of any polyribonucleotide or polydeoxribonucleotide, which may be unmodified RNA or DNA or modified RNA or DNA. For example, polynucleotides can be composed of single- and double-stranded DNA, DNA that is a mixture of single- and double-stranded regions, single- and double-stranded RNA, and RNA that is mixture of single- and double-stranded regions, hybrid molecules comprising DNA and RNA that may be single-stranded or, more typically, double-stranded or a mixture of single- and double-stranded regions. In addition, the polynucleotide can be composed of triple-stranded regions comprising RNA or DNA or both RNA and DNA. A polynucleotide may also contain one or more modified bases or DNA or RNA backbones modified for stability or for other reasons. “Modified” bases include, for example, tritylated bases and unusual bases such as inosine. A variety of modifications can be made to DNA and RNA; thus, “polynucleotide” embraces chemically, enzymatically, or metabolically modified forms.

[0136] The polypeptide of the present invention can be composed of amino acids joined to each other by peptide bonds or modified peptide bonds, i.e., peptide isosteres, and may contain amino acids other than the 20 gene-encoded amino acids. The polypeptides may be modified by either natural processes, such as posttranslational processing, or by chemical modification techniques which are well known in the art. Such modifications are well described in basic texts and in more detailed monographs, as well as in a voluminous research literature. Modifications can occur anywhere in a polypeptide, including the peptide backbone, the amino acid side-chains and the amino or carboxyl termini. It will be appreciated that the same type of modification may be present in the same or varying degrees at several sites in a given polypeptide. Also, a given polypeptide may contain many types of modifications. Polypeptides may be branched, for example, as a result of ubiquitination, and they may be cyclic, with or without branching. Cyclic, branched, and branched cyclic polypeptides may result from posttranslation natural processes or may be made by synthetic methods. Modifications include acetylation, acylation, ADP-ribosylation, amidation, covalent attachment of flavin, covalent attachment of a heme moiety, covalent attachment of a nucleotide or nucleotide derivative, covalent attachment of a lipid or lipid derivative, covalent attachment of phosphotidylinositol, cross-linking, cyclization, disulfide bond formation, demethylation, formation of covalent cross-links, formation of cysteine, formation of pyroglutamate, formylation, gamma-carboxylation, glycosylation, GPI anchor formation, hydroxylation, iodination, methylation, myristoylation, oxidation, pegylation, proteolytic processing, phosphorylation, prenylation, racemization, selenoylation, sulfation, transfer-RNA mediated addition of amino acids to proteins such as arginylation, and ubiquitination. (See, for instance, Proteins—Structure and Molecular Properties, 2nd Ed., T. E. Creighton, W. H. Freeman and Company, New York (1993); Posttranslational Covalent Modification of Proteins, B. C. Johnson, Ed., Academic Press, New York, pgs. 1-12 (1983); Seifter et al., Meth Enzymol 182:626-646 (1990); Rattan et al., Ann NY Acad Sci 663:48-62 (1992).)

[0137] “SEQ ID NO:X” refers to a polynucleotide sequence while “SEQ ID NO:Y” refers to a polypeptide sequence, both sequences are identified by an integer specified in Table I.

[0138] “A polypeptide having biological activity” refers to polypeptides exhibiting activity similar, but not necessarily identical to, an activity of a polypeptide of the present invention, including mature forms, as measured in a particular biological assay, with or without dose dependency. In the case where dose dependency does exist, it need not be identical to that of the polypeptide, but rather substantially similar to the dose-dependence in a given activity as compared to the polypeptide of the present invention (i.e., the candidate polypeptide will exhibit greater activity or not more than about 25-fold less and, preferably, not more than about tenfold less activity, and most preferably, not more than about three-fold less activity relative to the polypeptide of the present invention).

[0139] As will be appreciated by the skilled practitioner, should the amino acid fragment comprise an antigenic epitope, for example, biological function per se need not be maintained. The terms HGPRBMY30_{—}1, HGPRBMY30_{—}2, HGPRBMY30_{—}3, HGPRBMY41_{—}1, HGPRBMY41_{—}2, HGPRBMY41_{—}3, HGPRBMY42, HGPRBMY42_{—}1, HGPRBMY43, and/or HGPRBMY44 polypeptide and HGPRBMY30_{—}1, HGPRBMY30_{—}2, HGPRBMY30_{—}3, HGPRBMY41_{—}1, HGPRBMY41_{—}2, HGPRBMY41_{—}3, HGPRBMY42, HGPRBMY42_{—}1, HGPRBMY43, and/or HGPRBMY44 protein are used interchangeably herein to refer to the encoded product of the HGPRBMY30_{—}1, HGPRBMY30_{—}2, HGPRBMY30_{—}3, HGPRBMY41_{—}1, HGPRBMY41_{—}2, HGPRBMY41_{—}3, HGPRBMY42, HGPRBMY42_{—}1, HGPRBMY43, and/or HGPRBMY44 nucleic acid sequence according to the present invention.

[0140] It is another aspect of the present invention to provide modulators of the HGPRBMY30_{—}1, HGPRBMY30_{—}2, HGPRBMY30_{—}3, HGPRBMY41_{—}1, HGPRBMY41_{—}2, HGPRBMY41_{—}3, HGPRBMY42, HGPRBMY42_{—}1, HGPRBMY43, and/or HGPRBMY44 protein and HGPRBMY30_{—}1, HGPRBMY30_{—}2, HGPRBMY30_{—}3, HGPRBMY41_{—}1, HGPRBMY41_{—}2, HGPRBMY41_{—}3, HGPRBMY42, HGPRBMY42_{—}1, HGPRBMY43, and/or HGPRBMY44 peptide targets which can affect the function or activity of HGPRBMY30_{—}1, HGPRBMY30_{—}2, HGPRBMY30_{—}3, HGPRBMY41_{—}1, HGPRBMY41_{—}2, HGPRBMY41_{—}3, HGPRBMY42, HGPRBMY42_{—}1, HGPRBMY43, and/or HGPRBMY44 in a cell in which HGPRBMY30_{—}1, HGPRBMY30_{—}2, HGPRBMY30_{—}3, HGPRBMY41_{—}1, HGPRBMY41_{—}2, HGPRBMY41_{—}3, HGPRBMY42, HGPRBMY42_{—}1, HGPRBMY43, and/or HGPRBMY44 function or activity is to be modulated or affected. In addition, modulators of HGPRBMY30_{—}1, HGPRBMY30_{—}2, HGPRBMY30_{—}3, HGPRBMY41_{—}1, HGPRBMY41_{—}2, HGPRBMY41_{—}3, HGPRBMY42, HGPRBMY42_{—}1, HGPRBMY43, and/or HGPRBMY44 can affect downstream systems and molecules that are regulated by, or which interact with, HGPRBMY30_{—}1, HGPRBMY30_{—}2, HGPRBMY30_{—}3, HGPRBMY41_{—}1, HGPRBMY41_{—}2, HGPRBMY41_{—}3, HGPRBMY42, HGPRBMY42_{—}1, HGPRBMY43, and/or HGPRBMY44 in the cell. Modulators of HGPRBMY30_{—}1, HGPRBMY30_{—}2, HGPRBMY30_{—}3, HGPRBMY41_{—}1, HGPRBMY41_{—}2, HGPRBMY41_{—}3, HGPRBMY42, HGPRBMY42_{—}1, HGPRBMY43, and/or HGPRBMY44 include compounds, materials, agents, drugs, and the like, that antagonize, inhibit, reduce, block, suppress, diminish, decrease, or eliminate HGPRBMY30_{—}1, HGPRBMY30_{—}2, HGPRBMY30_{—}3, HGPRBMY41_{—}1, HGPRBMY41_{—}2, HGPRBMY41_{—}3, HGPRBMY42, HGPRBMY42_{—}1, HGPRBMY43, and/or HGPRBMY44 function and/or activity. Such compounds, materials, agents, drugs and the like can be collectively termed “antagonists”. Alternatively, modulators of HGPRBMY30_{—}1, HGPRBMY30_{—}2, HGPRBMY30_{—}3, HGPRBMY41_{—}1, HGPRBMY41_{—}2, HGPRBMY41_{—}3, HGPRBMY42, HGPRBMY42_{—}1, HGPRBMY43, and/or HGPRBMY44 include compounds, materials, agents, drugs, and the like, that agonize, enhance, increase, augment, or amplify HGPRBMY30_{—}1, HGPRBMY30_{—}2, HGPRBMY30_{—}3, HGPRBMY41_{—}1, HGPRBMY41_{—}2, HGPRBMY41_{—}3, HGPRBMY42, HGPRBMY42_{—}1, HGPRBMY43, and/or HGPRBMY44 function in a cell. Such compounds, materials, agents, drugs and the like can be collectively termed “agonists”.

[0141] As used herein the terms “modulate” or “modulates” refer to an increase or decrease in the amount, quality or effect of a particular activity, DNA, RNA, or protein. The definition of “modulate” or “modulates” as used herein is meant to encompass agonists and/or antagonists of a particular activity, DNA, RNA, or protein.

[0142] The term “organism” as referred to herein is meant to encompass any organism referenced herein, though preferably to eukaryotic organisms, more preferably to mammals, and most preferably to humans.

[0143] The present invention encompasses the identification of proteins, nucleic acids, or other molecules, that bind to polypeptides and polynucleotides of the present invention (for example, in a receptor-ligand interaction). The polynucleotides of the present invention can also be used in interaction trap assays (such as, for example, that described by Ozenberger and Young (Mol Endocrinol., 9(10):1321-9, (1995); and Ann. N. Y. Acad. Sci., 7;766:279-81, (1995)).

[0144] The polynucleotide and polypeptides of the present invention are useful as probes for the identification and isolation of full-length cDNAs and/or genomic DNA which correspond to the polynucleotides of the present invention, as probes to hybridize and discover novel, related DNA sequences, as probes for positional cloning of this or a related sequence, as probe to “subtract-out” known sequences in the process of discovering other novel polynucleotides, as probes to quantify gene expression, and as probes for microarrays.

[0145] In addition, polynucleotides and polypeptides of the present invention may comprise one, two, three, four, five, six, seven, eight, or more membrane domains.

[0146] Also, in preferred embodiments the present invention provides methods for further refining the biological function of the polynucleotides and/or polypeptides of the present invention.

[0147] Specifically, the invention provides methods for using the polynucleotides and polypeptides of the invention to identify orthologs, homologs, paralogs, variants, and/or allelic variants of the invention. Also provided are methods of using the polynucleotides and polypeptides of the invention to identify the entire coding region of the invention, non-coding regions of the invention, regulatory sequences of the invention, and secreted, mature, pro-, prepro-, forms of the invention (as applicable).

[0148] In preferred embodiments, the invention provides methods for identifying the glycosylation sites inherent in the polynucleotides and polypeptides of the invention, and the subsequent alteration, deletion, and/or addition of said sites for a number of desirable characteristics which include, but are not limited to, augmentation of protein folding, inhibition of protein aggregation, regulation of intracellular trafficking to organelles, increasing resistance to proteolysis, modulation of protein antigenicity, and mediation of intercellular adhesion.

[0149] In further preferred embodiments, methods are provided for evolving the polynucleotides and polypeptides of the present invention using molecular evolution techniques in an effort to create and identify novel variants with desired structural, functional, and/or physical characteristics.

[0150] The present invention further provides for other experimental methods and procedures currently available to derive functional assignments. These procedures include but are not limited to spotting of clones on arrays, micro-array technology, PCR based methods (e.g., quantitative PCR), anti-sense methodology, gene knockout experiments, and other procedures that could use sequence information from clones to build a primer or a hybrid partner.

[0151] Polynucleotides and Polypeptides of the Invention

[0152] Features of the Polypeptide Encoded by Gene No:1

[0153] The polypeptide of this gene provided as SEQ ID NO:2 (FIGS. 1A-C), encoded by the polynucleotide sequence according to SEQ ID NO:1 (FIGS. 1A-C), and/or encoded by the polynucleotide contained within the deposited clone, HGPRBMY30_{—}1 (also referred to as GPCR99 and/or GPCR51 splice variant 1), has significant homology at the nucleotide and amino acid level to a number of G-protein coupled receptors, which include, for example, other G-protein coupled receptors, specifically, the bovine parathyroid cell calcium-sensing receptor protein (CASR_BOVIN; SWISS-PROT Accession No: P35384; SEQ ID NO:21); the human parathyroid cell calcium-sensing receptor protein (CASR_HUMAN; SWISS-PROT Accession No: P41180; SEQ ID NO:22); the mouse parathyroid cell calcium-sensing receptor protein (CASR_MOUSE; SWISS-PROT Accession No: Q9QY96; SEQ ID NO:23); the rat parathyroid cell calcium-sensing receptor protein (CASR_RAT; SWISS-PROT Accession No: P48442; SEQ ID NO:24); the human metabotropic glutamate receptor 2 precursor protein (MGR2_HUMAN; SWISS-PROT Accession No: Q14416; SEQ ID NO:25); the rat metabotropic glutamate receptor 2 precursor protein (MGR2_RAT; SWISS-PROT Accession No: P31421; SEQ ID NO:26); the Fugu calcium2+ sensing receptor protein (O73635; SWISS-PROT Accession No: O73635; SEQ ID NO:27); the Fugu pheromone receptor 1 protein (O73636; SWISS-PROT Accession No: O73636; SEQ ID NO:28); the Fugu pheromone receptor 2 protein (O73637; SWISS-PROT Accession No: O73637; SEQ ID NO:29); the Fugu pheromone receptor 3 protein (O73638; SWISS-PROT Accession No: O73638; SEQ ID NO:30); the Fugu pheromone receptor 4 protein (O73639; SWISS-PROT Accession No: O73639; SEQ ID NO:31); the Fugu pheromone receptor 5 protein (O73640; SWISS-PROT Accession No: O73640; SEQ ID NO:32); the goldfish putative odorant receptor 1 protein (O93552; SWISS-PROT Accession No: O93552; SEQ ID NO:33); the goldfish putative odorant receptor 2 protein (O93553; SWISS-PROT Accession No: O93553; SEQ ID NO:34); the mouse putative sweet taste receptor T1R1 protein (Q99PG5; SWISS-PROT Accession No: Q99PG5; SEQ ID NO:35); the mouse putative sweet taste receptor T1R1 protein (Q99PG6; SWISS-PROT Accession No: Q9EQ96; SEQ ID NO:9); the human metabotropic glutamate receptor type 2 protein (Q9H3N6; SWISS-PROT Accession No: Q9H3N6; SEQ ID NO:36); the goldfish odorant receptor 5.24 protein (Q9PW88; SWISS-PROT Accession No: Q9PW88; SEQ ID NO:37); the rat putative taste receptor TR2 protein (Q9Z0R7; SWISS-PROT Accession No: Q9Z0R7; SEQ ID NO:38); and the rat putative taste receptor TR2 protein (Q9Z0R8; SWISS-PROT Accession No: Q9Z0R8; SEQ ID NO:39). An alignment of the HGPRBMY30_{—}1, polypeptide with these proteins is provided in FIGS. 11A-K.

[0154] The HGPRBMY30_{—}1 polynucleotide (SEQ ID NO:1) and polypeptide (SEQ ID NO:2) represents a novel splice variant form of the HGPBMY30 polypeptide (SEQ ID NO:86). The HGPRBMY30 polynucleotide and polypeptide are disclosed in copending U.S. Ser. No. 60/294,411, filed May 30, 2001; and copending U.S. Ser. No. 10/159,339, filed May 30, 2002, which are hereby incorporated herein by reference in their entirety.

[0155] The determined nucleotide sequence of the HGPRBMY30_{—}1, cDNA in FIGS. 1A-C (SEQ ID NO:1) contains an open reading frame encoding a protein of about 863 amino acid residues, with a deduced molecular weight of about 94.6 kDa. The amino acid sequence of the predicted HGPRBMY30_{—}1 polypeptide is shown in FIGS. 1A-C (SEQ ID NO:2). The HGPRBMY30_{—}1 protein shown in FIGS. 1A-C was determined to share significant identity and similarity to several known G-protein coupled receptors, as shown in FIGS. 11A-K. The percent identity and similarity values between the HGPRBMY30_{—}1 polypeptide to these known G-protein coupled receptors is provided in FIG. 17.

[0156] The HGPRBMY30_{—}1 polypeptide was also determined to comprise several conserved cysteines which are denoted by dark shading, in addition to other identical residues, as shown in FIGS. 11A-K. Conservation of cysteines at key amino acid residues is indicative of conserved structural features, which may correlate with conservation of protein function and/or activity.

[0157] Expression profiling designed to measure the steady state mRNA levels encoding the HGPRBMY30_{—}1 polypeptide showed predominately high expression levels in the expressed highly in the testis; significantly in the heart, pituitary gland, lymph node, and to a lesser extent, in kidney, spleen, pancreas, small intestine, thymus, lung, spinal cord, bone marrow, brain, prostate (See FIG. 16). The expression profile of the HGPRBMY30_{—}1 splice variant is expected to be the same or similar to HGPRBMY30.

[0158] Based upon the strong homology to members of the G-protein coupled receptor proteins, the HGPRBMY30_{—}1 polypeptide is expected to share at least some biological activity with G-protein coupled receptors, specifically parathyroid cell calcium-sensing receptor proteins, metabotropic glutamate receptors, pheromone receptors, odorant receptors, sweet taste receptors, metabotropic glutamate receptor type 2 proteins, and more preferably with G-protein coupled receptors found within testis, heart, pituitary gland, and/or lymph node, in addition to the G-protein coupled receptors referenced elsewhere herein.

[0159] The HGPRBMY30_{—}1 polynucleotides and polypeptides of the present invention, including agonists and/or fragments thereof, have uses that include detecting, prognosing, treating, preventing, and/or ameliorating the following diseases and/or disorders, neural disorders, metabolic disorders, gastrointestinal disorders, reproductive disorders, Alzheimer's, Parkinson's, diabetes, dwarfism, color blindness, retinal pigmentosa and asthma, depression, schizophrenia, sleeplessness, hypertension, anxiety, stress, renal failure, acute heart failure, hypotension, hypertension, endocrinal diseases, growth disorders, neuropathic pain, obesity, anorexia, HIV infections, cancers, bulimia, asthma, Parkinson's disease, osteoporosis, angina pectoris, myocardial infarction, psychotic, metabolic, cardiovascular and neurological disorders. Also, compounds acting on this receptor can be used as taste modifiers.

[0160] The HGPRBMY30_{—}1 polynucleotides and polypeptides of the present invention, including agonists and/or fragments thereof, have uses that include modulating signal transduction activity, in various cells, tissues, and organisms, and particularly in mammalian testis, heart, pituitary gland, and lymph node, preferably human tissue.

[0161] The strong homology to human G-protein coupled receptors, particularly parathyroid cell calcium-sensing receptors and metabotropic glutamate receptors, combined with the predominate localized HGPRBMY30 expression in testis suggests the potential utility for HGPRBMY30_{—}1 polynucleotides and polypeptides in treating, diagnosing, prognosing, and/or preventing testicular, in addition to reproductive disorders.

[0162] In preferred embodiments, HGPRBMY30_{—}1 polynucleotides and polypeptides including agonists and fragments thereof, have uses which include treating, diagnosing, prognosing, and/or preventing the following, non-limiting, diseases or disorders of the testis: spermatogenesis, infertility, Klinefelter's syndrome, XX male, epididymitis, genital warts, germinal cell aplasia, cryptorchidism, varicocele, immotile cilia syndrome, and viral orchitis. The HGPRBMY30_{—}1 polynucleotides and polypeptides including agonists and fragments thereof, may also have uses related to modulating testicular development, embryogenesis, reproduction, and in ameliorating, treating, and/or preventing testicular proliferative disorders (e.g., cancers, which include, for example, choriocarcinoma, Nonseminoma, seminona, and testicular germ cell tumors).

[0163] Likewise, the predominate localized HGPRBMY30 expression in testis tissue also emphasizes the potential utility for HGPRBMY30_{—}1 polynucleotides and polypeptides in treating, diagnosing, prognosing, and/or preventing metabolic diseases and disorders which include the following, not limiting examples: premature puberty, incomplete puberty, Kallman syndrome, Cushing's syndrome, hyperprolactinemia, hemochromatosis, congenital adrenal hyperplasia, FSH deficiency, and granulomatous disease, for example.

[0164] This gene product may also be useful in assays designed to identify binding agents, as such agents (antagonists) are useful as male contraceptive agents. The testes are also a site of active gene expression of transcripts that is expressed, particularly at low levels, in other tissues of the body. Therefore, this gene product may be expressed in other specific tissues or organs where it may play related functional roles in other processes, such as hematopoiesis, inflammation, bone formation, and kidney function, to name a few possible target indications.

[0165] The strong homology to human G-protein coupled receptors, particularly metabotropic glutamate receptor family and calcium-sensing receptor members, combined with the localized HGPRBMY30 expression in heart tissue suggests the HGPRBMY30_{—}1 polynucleotides and polypeptides may be useful in treating, diagnosing, prognosing, and/or preventing cardiovascular diseases and/or disorders, which include, but are not limited to: myocardio infarction, congestive heart failure, arrthymias, cardiomyopathy, atherosclerosis, arterialsclerosis, microvascular disease, embolism, thromobosis, pulmonary edema, palpitation, dyspnea, angina, hypotension, syncope, heart murmer, aberrant ECG, hypertrophic cardiomyopathy, the Marfan syndrome, sudden death, prolonged QT syndrome, congenital defects, cardiac viral infections, valvular heart disease, and hypertension.

[0166] Similarly, HGPRBMY30_{—}1 polynucleotides and polypeptides may be useful for ameliorating cardiovascular diseases and symptoms which result indirectly from various non-cardiavascular effects, which include, but are not limited to, the following, obesity, smoking, Down syndrome (associated with endocardial cushion defect); bony abnormalities of the upper extremities (associated with atrial septal defect in the Holt-Oram syndrome); muscular dystrophies (associated with cardiomyopathy); hemochromatosis and glycogen storage disease (associated with myocardial infiltration and restrictive cardiomyopathy); congenital deafness (associated with prolonged QT interval and serious cardiac arrhythmias); Raynaud's disease (associated with primary pulmonary hypertension and coronary vasospasm); connective tissue disorders, i.e., the Marfan syndrome, Ehlers-Danlos and Hurler syndromes, and related disorders of mucopolysaccharide metabolism (aortic dilatation, prolapsed mitral valve, a variety of arterial abnormalities); acromegaly (hypertension, accelerated coronary atherosclerosis, conduction defects, cardiomyopathy); hyperthyroidism (heart failure, atrial fibrillation); hypothyroidism (pericardial effusion, coronary artery disease); rheumatoid arthritis (pericarditis, aortic valve disease); scleroderma (cor pulmonale, myocardial fibrosis, pericarditis); systemic lupus erythematosus (valvulitis, myocarditis, pericarditis); sarcoidosis (arrhythmias, cardiomyopathy); postmenopausal effects, Chlamydial infections, polycystic ovary disease, thyroid disease, alcoholism, diet, and exfoliative dermatitis (high-output heart failure), for example.

[0167] Moreover, polynucleotides and polypeptides, including fragments and/or antagonists thereof, have uses which include, directly or indirectly, treating, preventing, diagnosing, and/or prognosing the following, non-limiting, cardiovascular infections: blood stream invasion, bacteremia, sepsis, Streptococcus pneumoniae infection, group a streptococci infection, group b streptococci infection, Enterococcus infection, nonenterococcal group D streptococci infection, nonenterococcal group C streptococci infection, nonenterococcal group G streptococci infection, Streptoccus viridans infection, Staphylococcus aureus infection, coagulase-negative staphylococci infection, gram-negative Bacilli infection, Enterobacteriaceae infection, Psudomonas spp. Infection, Acinobacter spp. Infection, Flavobacterium meningosepticum infection, Aeromonas spp. Infection, Stenotrophomonas maltophilia infection, gram-negative coccobacilli infection, Haemophilus influenza infection, Branhamella catarrhalis infection, anaerobe infection, Bacteriodes fragilis infection, Clostridium infection, fungal infection, Candida spp. Infection, non-albicans Candida spp. Infection, Hansenula anomala infection, Malassezia furfur infection, nontuberculous Mycobacteria infection, Mycobacterium avium infection, Mycobacterium chelonae infection, Mycobacterium fortuitum infection, spirochetal infection, Borrelia burgdorferi infection, in addition to any other cardiovascular disease and/or disorder (e.g., non-sepsis) implicated by the causative agents listed above or elsewhere herein.

[0168] The strong homology to human G-protein coupled receptors, particularly metabotropic glutamate receptor family and calcium-sensing receptor members, combined with the localized HGPRBMY30 expression in pituitary gland tissue suggests the HGPRBMY30 polynucleotides and polypeptides may be useful in treating, diagnosing, prognosing, and/or preventing endocrine diseases and/or disorders, which include, but are not limited to, the following: aberrant growth hormone synthesis and/or secretion, aberrant prolactin synthesis and/or secretion, aberrant luteinizing hormone synthesis and/or secretion, aberrant follicle-stimulating hormone synthesis and/or secretion, aberrant thyroid-stimulating hormone synthesis and/or secretion, aberrant adrenocorticotropin synthesis and/or secretion, aberrant vasopressin secretion, aberrant oxytocin secretion, aberrant growth, aberrant lactation, aberrant sexual characteristic development, aberrant testosterone synthesis and/or secretion, aberrant estrogen synthesis and/or secretion, aberrant water homeostasis, hypogonadism, Addison's disease, hypothyroidism, Cushing's disease, agromegaly, gigantism, lethargy, osteoporosis, aberrant calcium homeostasis, aberrant potassium homeostasis, reproductive disorders, and developmental disoders.

[0169] The strong homology to human G-protein coupled receptors, particularly metabotropic glutamate receptor family and calcium-sensing receptor members, combined with the localized HGPRBMY30 expression in lymph node tissue suggests the HGPRBMY30_{—}1 polynucleotides and polypeptides may be useful in treating, diagnosing, prognosing, and/or preventing immune diseases and/or disorders. Representative uses are described in the “Immune Activity”, “Chemotaxis”, and “Infectious Disease” sections below, and elsewhere herein. Briefly, the strong expression in immune tissue indicates a role in regulating the proliferation; survival; differentiation; and/or activation of hematopoietic cell lineages, including blood stem cells.

[0170] The HGPRBMY30_{—}1 polypeptide may also be useful as a preventative agent for immunological disorders including arthritis, asthma, immunodeficiency diseases such as AIDS, leukemia, rheumatoid arthritis, granulomatous disease, inflammatory bowel disease, sepsis, acne, neutropenia, neutrophilia, psoriasis, hypersensitivities, such as T-cell mediated cytotoxicity; immune reactions to transplanted organs and tissues, such as host-versus-graft and graft-versus-host diseases, or autoimmunity disorders, such as autoimmune infertility, lense tissue injury, demyelination, systemic lupus erythematosis, drug induced hemolytic anemia, rheumatoid arthritis, Sjogren's disease, and scleroderma. The HGPRBMY30_{—}1 polypeptide may be useful for modulating cytokine production, antigen presentation, or other processes, such as for boosting immune responses, etc.

[0171] Moreover, the protein may represent a secreted factor that influences the differentiation or behavior of other blood cells, or that recruits hematopoietic cells to sites of injury. Thus, this gene product is thought to be useful in the expansion of stem cells and committed progenitors of various blood lineages, and in the differentiation and/or proliferation of various cell types. Furthermore, the protein may also be used to determine biological activity, raise antibodies, as tissuemarkers, to isolate cognate ligands or receptors, to identify agents that modulate their interactions, in addition to its use as a nutritional supplement. Protein, as well as, antibodies directed against the protein may show utility as a tumor marker and/or immunotherapy targets for the above listed tissues.

[0172] The HGPRBMY30_{—}1 polynucleotides and polypeptides, including fragments and agonists thereof, may have uses which include, either directly or indirectly, for boosting immune responses.

[0173] The HGPRBMY30_{—}1 polynucleotides and polypeptides, including fragments and /or modulators thereof, may have uses which include identification of modulators of HGPRBMY30_{—}1 function including antibodies (for detection or neutralization), naturally-occurring modulators and small molecule modulators. Antibodies to domains of the HGPRBMY30_{—}1 protein could be used as diagnostic agents of reproductive and inflammatory conditions in patients, are useful in monitoring the activation of signal transduction pathways, and can be used as a biomarker for the involvement of G-protein couplded receptors in disease states, and in the evaluation of inhibitors of G-protein coupled receptors in vivo.

[0174] HGPRBMY30_{—}1 polypeptides and polynucleotides have additional uses which include diagnosing diseases related to the over and/or under expression of HGPRBMY30_{—}1 by identifying mutations in the HGPRBMY30_{—}1 gene by using HGPRBMY30_{—}1 sequences as probes or by determining HGPRBMY30_{—}1 protein or mRNA expression levels. HGPRBMY30_{—}1 polypeptides may be useful for screening compounds that affect the activity of the protein. HGPRBMY30_{—}1 peptides can also be used for the generation of specific antibodies and as bait in yeast two hybrid screens to find proteins the specifically interact with HGPRBMY30_{—}1 (described elsewhere herein).

[0175] Although it is believed the encoded polypeptide may share at least some biological activities with human G-protein coupled receptor proteins (particularly G-protein coupled receptors belonging to the metabotropic glutamate receptor and calcium-sensing receptor protein families), a number of methods of determining the exact biological function of this clone are either known in the art or are described elsewhere herein. Briefly, the function of this clone may be determined by applying microarray methodology. Nucleic acids corresponding to the HGPRBMY30_{—}1 polynucleotides, in addition to, other clones of the present invention, may be arrayed on microchips for expression profiling. Depending on which polynucleotide probe is used to hybridize to the slides, a change in expression of a specific gene may provide additional insight into the function of this gene based upon the conditions being studied. For example, an observed increase or decrease in expression levels when the polynucleotide probe used comes from diseased testis tissue, as compared to, normal tissue might indicate a function in modulating immune function, for example. In the case of HGPRBMY30_{—}1, testis, heart, pituitary gland, lymph node, kidney, spleen, pancreas, small intestine, thymus, lung, spinal cord, bone marrow, brain, and/or prostate tissue should be used, for example, to extract RNA to prepare the probe.

[0176] In addition, the function of the protein may be assessed by applying quantitative PCR methodology, for example. Real time quantitative PCR would provide the capability of following the expression of the HGPRBMY30_{—}1 gene throughout development, for example. Quantitative PCR methodology requires only a nominal amount of tissue from each developmentally important step is needed to perform such experiments. Therefore, the application of quantitative PCR methodology to refining the biological function of this polypeptide is encompassed by the present invention. In the case of HGPRBMY30_{—}1, a disease correlation related to HGPRBMY30_{—}1 may be made by comparing the mRNA expression level of HGPRBMY30_{—}1 in normal tissue, as compared to diseased tissue (particularly diseased tissue isolated from the following: testis, heart, pituitary gland, lymph node, kidney, spleen, pancreas, small intestine, thymus, lung, spinal cord, bone marrow, brain, and/or prostate tissue). Significantly higher or lower levels of HGPRBMY30_{—}1 expression in the diseased tissue may suggest HGPRBMY30_{—}1 plays a role in disease progression, and antagonists against HGPRBMY30_{—}1 polypeptides would be useful therapeutically in treating, preventing, and/or ameliorating the disease. Alternatively, significantly higher or lower levels of HGPRBMY30_{—}1 expression in the diseased tissue may suggest HGPRBMY30_{—}1 plays a defensive role against disease progression, and agonists of HGPRBMY30_{—}1 polypeptides may be useful therapeutically in treating, preventing, and/or ameliorating the disease. Also encompassed by the present invention are quantitative PCR probes corresponding to the polynucleotide sequence provided as SEQ ID NO:1 (FIGS. 1A-D).

[0177] The function of the protein may also be assessed through complementation assays in yeast. For example, in the case of the HGPRBMY30_{—}1, transforming yeast deficient in metabotropic glutamate receptor or calcium-sensing receptor G-protein coupled receptor activity, for example, and assessing their ability to grow would provide convincing evidence the HGPRBMY30_{—}1 polypeptide has metabotropic glutamate receptor or calcium-sensing receptor G-protein coupled receptor activity. Additional assay conditions and methods that may be used in assessing the function of the polynucleotides and polypeptides of the present invention are known in the art, some of which are disclosed elsewhere herein.

[0178] Alternatively, the biological function of the encoded polypeptide may be determined by disrupting a homologue of this polypeptide in Mice and/or rats and observing the resulting phenotype. Such knock-out experiments are known in the art, some of which are disclosed elsewhere herein.

[0179] Moreover, the biological function of this polypeptide may be determined by the application of antisense and/or sense methodology and the resulting generation of transgenic mice and/or rats. Expressing a particular gene in either sense or antisense orientation in a transgenic mouse or rat could lead to respectively higher or lower expression levels of that particular gene. Altering the endogenous expression levels of a gene can lead to the observation of a particular phenotype that can then be used to derive indications on the function of the gene. The gene can be either over-expressed or under expressed in every cell of the organism at all times using a strong ubiquitous promoter, or it could be expressed in one or more discrete parts of the organism using a well characterized tissue-specific promoter (e.g., testis, heart, pituitary gland, lymph node, kidney, spleen, pancreas, small intestine, thymus, lung, spinal cord, bone marrow, brain, and/or prostate-tissue specific promoter), or it can be expressed at a specified time of development using an inducible and/or a developmentally regulated promoter.

[0180] In the case of HGPRBMY30_{—}1 transgenic mice or rats, if no phenotype is apparent in normal growth conditions, observing the organism under diseased conditions (reproductive, cardiovascular, endocrine, immune, renal, gastrointestinal, pulmonary, and/or neural disorders, in addition to cancers, etc.) may lead to understanding the function of the gene. Therefore, the application of antisense and/or sense methodology to the creation of transgenic mice or rats to refine the biological function of the polypeptide is encompassed by the present invention.

[0181] In preferred embodiments, the following N-terminal HGPRBMY30_{—}1 deletion polypeptides are encompassed by the present invention: M1-E863, L2-E863, G3-E863, P4-E863, A5-E863, V6-E863, L7-E863, G8-E863, L9-E863, S10-E863, L11-E863, W12-E863, A13-E863, L14-E863, L15-E863, H16-E863, P17-E863, G18-E863, T19-E863, G20-E863, A21-E863, P22-E863, L23-E863, C24-E863, L25-E863, S26-E863, Q27-E863, Q28-E863, L29-E863, R30-E863, M31-E863, K32-E863, G33-E863, D34-E863, Y35-E863, V36-E863, L37-E863, G38-E863, G39-E863, L40-E863, F41-E863, P42-E863, L43-E863, G44-E863, E45-E863, A46-E863, E47-E863, E48-E863, A49-E863, G50-E863, L51-E863, R52-E863, S53-E863, R54-E863, T55-E863, R56-E863, P57-E863, S58-E863, S59-E863, P60-E863, V61-E863, C62-E863, T63-E863, R64-E863, F65-E863, S66-E863, S67-E863, N68-E863, G69-E863, L70-E863, L71-E863, W72-E863, A73-E863, L74-E863, A75-E863, M76-E863, K77-E863, M78-E863, A79-E863, V80-E863, E81-E863, E82-E863, I83-E863, N84-E863, N85-E863, K86-E863, S87-E863, D88-E863, L89-E863, L90-E863, P91-E863, G92-E863, L93-E863, R94-E863, L95-E863, G96-E863, Y97-E863, D98-E863, L99-E863, F100-E863, D101-E863, T102-E863, C103-E863, S104-E863, E105-E863, P106-E863, V107-E863, V108-E863, A109-E863, M110-E863, K111-E863, P112-E863, S113-E863, L114-E863, M115-E863, F116-E863, L117-E863, A118-E863, K119-E863, A120-E863, G121-E863, S122-E863, R123-E863, D124-E863, I125-E863, A126-E863, A127-E863, Y128-E863, C129-E863, N130-E863, Y131-E863, T132-E863, Q133-E863, Y134-E863, Q135-E863, P136-E863, R137-E863, V138-E863, L139-E863, A140-E863, V141-E863, I142-E863, G143-E863, P144-E863, H145-E863, S146-E863, S147-E863, E148-E863, L149-E863, A150-E863, M151-E863, V152-E863, T153-E863, G154-E863, K155-E863, F156-E863, F157-E863, S158-E863, F159-E863, F160-E863, L161-E863, M162-E863, P163-E863, Q164-E863, V165-E863, S166-E863, Y167-E863, G168-E863, A169-E863, S170-E863, M171-E863, E172-E863, L173-E863, L174-E863, S175-E863, A176-E863, R177-E863, E178-E863, T179-E863, F180-E863, P181-E863, S182-E863, F183-E863, F184-E863, R185-E863, T186-E863, V187-E863, P188-E863, S189-E863, D190-E863, R191-E863, V192-E863, Q193-E863, L194-E863, T195-E863, A196-E863, A197-E863, A198-E863, E199-E863, L200-E863, L201-E863, Q202-E863, E203-E863, F204-E863, G205-E863, W206-E863, N207-E863, W208-E863, V209-E863, A210-E863, A211-E863, L212-E863, G213-E863, S214-E863, D215-E863, D216-E863, E217-E863, Y218-E863, G219-E863, R220-E863, Q221-E863, G222-E863, L223-E863, S224-E863, I225-E863, F226-E863, S227-E863, A228-E863, L229-E863, A230-E863, A231-E863, A232-E863, R233-E863, G234-E863, I235-E863, C236-E863, I237-E863, A238-E863, H239-E863, E240-E863, G241-E863, L242-E863, V243-E863, P244-E863, L245-E863, P246-E863, R247-E863, A248-E863, D249-E863, D250-E863, S251-E863, R252-E863, L253-E863, G254-E863, K255-E863, V256-E863, Q257-E863, D258-E863, V259-E863, L260-E863, H261-E863, Q262-E863, V263-E863, N264-E863, Q265-E863, S266-E863, S267-E863, V268-E863, Q269-E863, V270-E863, V271-E863, L272-E863, L273-E863, F274-E863, A275-E863, S276-E863, V277-E863, H278-E863, A279-E863, A280-E863, H281-E863, A282-E863, L283-E863, F284-E863, N285-E863, Y286-E863, S287-E863, I288-E863, S289-E863, S290-E863, R291-E863, L292-E863, S293-E863, P294-E863, K295-E863, V296-E863, W297-E863, V298-E863, A299-E863, S300-E863, E301-E863, A302-E863, W303-E863, L304-E863, T305-E863, S306-E863, D307-E863, L308-E863, V309-E863, M310-E863, G311-E863, L312-E863, P313-E863, G314-E863, M315-E863, A316-E863, Q317-E863, M318-E863, G319-E863, T320-E863, V321-E863, L322-E863, G323-E863, F324-E863, L325-E863, Q326-E863, R327-E863, G328-E863, A329-E863, Q330-E863, L331-E863, H332-E863, E333-E863, F334-E863, P335-E863, Q336-E863, Y337-E863, V338-E863, K339-E863, T340-E863, H341-E863, L342-E863, A343-E863, L344-E863, A345-E863, T346-E863, D347-E863, P348-E863, A349-E863, F350-E863, C351-E863, S352-E863, A353-E863, L354-E863, G355-E863, E356-E863, R357-E863, E358-E863, Q359-E863, G360-E863, L361-E863, E362-E863, E363-E863, D364-E863, V365-E863, V366-E863, G367-E863, Q368-E863, R369-E863, C370-E863, P371-E863, Q372-E863, C373-E863, D374-E863, C375-E863, I376-E863, T377-E863, L378-E863, Q379-E863, N380-E863, V381-E863, S382-E863, A383-E863, G384-E863, L385-E863, N386-E863, H387-E863, H388-E863, Q389-E863, T390-E863, F391-E863, S392-E863, V393-E863, Y394-E863, A395-E863, A396-E863, V397-E863, Y398-E863, S399-E863, V400-E863, A401-E863, Q402-E863, A403-E863, L404-E863, H405-E863, N406-E863, T407-E863, L408-E863, Q409-E863, C410-E863, N411-E863, A412-E863, S413-E863, G414-E863, C415-E863, P416-E863, A417-E863, Q418-E863, D419-E863, P420-E863, V421-E863, K422-E863, P423-E863, W424-E863, Q425-E863, L426-E863, L427-E863, E428-E863, N429-E863, M430-E863, Y431-E863, N432-E863, L433-E863, T434-E863, F435-E863, H436-E863, V437-E863, G438-E863, G439-E863, L440-E863, P441-E863, L442-E863, R443-E863, F444-E863, D445-E863, S446-E863, S447-E863, G448-E863, N449-E863, V450-E863, D451-E863, M452-E863, E453-E863, Y454-E863, D455-E863, L456-E863, K457-E863, L458-E863, W459-E863, V460-E863, W461-E863, Q462-E863, G463-E863, S464-E863, V465-E863, P466-E863, R467-E863, L468-E863, H469-E863, D470-E863, V471-E863, G472-E863, R473-E863, F474-E863, N475-E863, G476-E863, S477-E863, L478-E863, R479-E863, T480-E863, E481-E863, R482-E863, L483-E863, K484-E863, I485-E863, R486-E863, W487-E863, H488-E863, T489-E863, S490-E863, D491-E863, N492-E863, Q493-E863, P494-E863, S495-E863, R496-E863, A497-E863, R498-E863, P499-E863, Q500-E863, A501-E863, C502-E863, A503-E863, Q504-E863, and/or K505-E863 of SEQ ID NO:2. Polynucleotide sequences encoding these polypeptides are also provided. The present invention also encompasses the use of these N-terminal HGPRBMY30_{—}1 deletion polypeptides as immunogenic and/or antigenic epitopes as described elsewhere herein.

[0182] In preferred embodiments, the following C-terminal HGPRBMY30_{—}1 deletion polypeptides are encompassed by the present invention: M1-E863, M1-H862, M1-K861, M1-G860, M1-Q859, M1-N858, M1-G857, M1-T856, M1-N855, M1-G854, M1-D853, M1-N852, M1-Q851, M1-G850, M1-Q849, M1-A848, M1-D847, M1-G846, M1-P845, M1-G844, M1-G843, M1-G842, M1-L841, M1-F840, M1-F839, M1-E838, M1-P837, M1-T836, M1-N835, M1-L834, M1-G833, M1-P832, M1-Q831, M1-R830, M1-M829, M1-L828, M1-L827, M1-Y826, M1-C825, M1-R824, M1-P823, M1-L822, M1-H821, M1-F820, M1-A819, M1-A818, M1-L817, M1-I816, M1-G815, M1-L814, M1-V813, M1-C812, M1-L811, M1-L810, M1-L809, M1-A808, M1-G807, M1-M806, M1-Q805, M1-V804, M1-A803, M1-P802, M1-R801, M1-L800, M1-V799, M1-V798, M1-Q797, M1-V796, M1-N795, M1-A794, M1-L793, M1-L792, M1-P791, M1-V790, M1-F789, M1-S788, M1-V787, M1-W786, M1-T785, M1-I784, M1-F783, M1-Y782, M1-A781, M1-L780, M1-M779, M1-A778, M1-F777, M1-T776, M1-L775, M1-G774, M1-R773, M1-A772, M1-R771, M1-N770, M1-Y769, M1-R768, M1-G767, M1-P766, M1-Q765, M1-S764, M1-R763, M1-V762, M1-L761, M1-F760, M1-T759, M1-G758, M1-L757, M1-F756, M1-C755, M1-L754, M1-F753, M1-A752, M1-L751, M1-T750, M1-A749, M1-N748, M1-T747, M1-A746, M1-H745, M1-A744, M1-L743, M1-G742, M1-F741, M1-S740, M1-V739, M1-W738, M1-S737, M1-R736, M1-T735, M1-R734, M1-C733, M1-H732, M1-V731, M1-L730, M1-A729, M1-E728, M1-T727, M1-P726, M1-L725, M1-M724, M1-H723, M1-W722, M1-D721, M1-T720, M1-V719, M1-V718, M1-E717, M1-P716, M1-P715, M1-F714, M1-A713, M1-V712, M1-L711, M1-Y710, M1-W709, M1-T708, M1-C707, M1-L706, M1-A705, M1-V704, M1-E703, M1-V702, M1-L701, M1-M700, M1-A699, M1-L698, M1-L697, M1-V696, M1-V695, M1-L694, M1-W693, M1-A692, M1-W691, M1-P690, Mi-G689, M1-R688, M1-L687, M1-C686, M1-G685, M1-S684, M1-L683, M1-R682, M1-D681, M1-A680, M1-W679, M1-S678, M1-L677, M1-P676, M1-L675, M1-E674, M1-S673, M1-E672, M1-V671, M1-F670, M1-I669, M1-E668, M1-A667, M1-A666, M1-Q665, M1-L664, M1-F663, M1-L662, M1-T661, M1-S660, M1-L659, M1-C658, M1-G657, M1-T656, M1-L655, M1-P654, M1-L653, M1-H652, M1-S651, M1-L650, M1-P649, M1-Q648, M1-Q647, M1-A646, M1-L645, M1-C644, M1-R643, M1-A642, M1-P641, M1-S640, M1-P639, M1-Q638, M1-G637, M1-P636, M1-F635, M1-L634, M1-L633, M1-V632, M1-S631, M1-L630, M1-C629, M1-V628, M1-L627, M1-G626, M1-L625, M1-C624, M1-V623, M1-L622, M1-G621, M1-F620, M1-C619, M1-A618, M1-L617, M1-P616, M1-G615, M1-G614, M1-S613, M1-A612, M1-Q611, M1-V610, M1-L609, M1-P608, M1-S607, M1-D606, M1-R605, M1-H604, M1-H603, M1-V602, M1-F601, M1-L600, M1-G599, M1-L598, M1-A597, M1-A596, M1-L595, M1-V594, M1-L593, M1-G592, M1-L591, M1-A590, M1-L589, M1-S588, M1-L587, M1-L586, M1-L585, M1-L584, M1-L583, M1-L582, M1-L581, M1-V580, M1-A579, M1-P578, M1-E577, M1-G576, M1-W575, M1-A574, M1-L573, M1-F572, M1-R571, M1-S570, M1-R569, M1-R568, M1-R567, M1-F566, M1-C565, M1-R564, M1-T563, M1-S562, M1-R561, M1-E560, M1-P559, M1-S558, M1-W557, M1-E556, M1-D555, M1-Q554, M1-G553, M1-C552, M1-F551, M1-T550, M1-C549, M1-A548, M1-I547, M1-D546, M1-D545, M1-P544, M1-N543, M1-Q542, M1-R541, M1-Y540, M1-S539, M1-G538, M1-A537, M1-E536, M1-C535, M1-D534, M1-V533, M1-C532, M1-D531, M1-Y530, M1-C529, M1-C528, M1-S527, M1-H526, M1-F525, M1-G524, M1-K523, M1-V522, M1-R521, M1-R520, M1-V519, M1-Q518, M1-G517, M1-E516, M1-Q515, M1-C514, M1-Q513, M1-R512, M1-S511, M1-C510, M1-R509, M1-S508, M1-V507, M1-P506, M1-K505, M1-Q504, M1-A503, M1-C502, M1-A501, M1-Q500, M1-P499, M1-R498, M1-A497, M1-R496, M1-S495, M1-P494, M1-Q493, M1-N492, M1-D491, M1-S490, M1-T489, M1-H488, M1-W487, M1-R486, M1-I485, M1-K484, M1-L483, M1-R482, M1-E481, M1-T480, M1-R479, M1-L478, M1-S477, M1-G476, M1-N475, M1-F474, M1-R473, M1-G472, M1-V471, M1-D470, M1-H469, M1-L468, M1-R467, M1-P466, M1-V465, M1-S464, M1-G463, M1-Q462, M1-W461, M1-V460, M1-W459, M1-L458, M1-K457, M1-L456, M1-D455, M1-Y454, M1-E453, M1-M452, M1-D451, M1-V450, M1-N449, M1-G448, M1-S447, M1-S446, M1-D445, M1-F444, M1-R443, M1-L442, M1-P441, M1-L440, M1-G439, M1-G438, M1-V437, M1-H436, M1-F435, M1-T434, M1-L433, M1-N432, M1-Y431, M1-M430, M1-N429, M1-E428, M1-L427, M1-L426, M1-Q425, M1-W424, M1-P423, M1-K422, M1-V421, M1-P420, M1-D419, M1-Q418, M1-A417, M1-P416, M1-C415, M1-G414, M1-S413, M1-A412, M1-N411, M1-C410, M1-Q409, M1-L408, M1-T407, M1-N406, M1-H405, M1-L404, M1-A403, M1-Q402, M1-A401, M1-V400, M1-S399, M1-Y398, M1-V397, M1-A396, M1-A395, M1-Y394, M1-V393, M1-S392, M1-F391, M1-T390, M1-Q389, M1-H388, M1-H387, M1-N386, M1-L385, M1-G384, M1-A383, M1-S382, M1-V381, M1-N380, M1-Q379, M1-L378, M1-T377, M1-I376, M1-C375, M1-D374, M1-C373, M1-Q372, M1-P371, M1-C370, M1-R369, M1-Q368, M1-G367, M1-V366, M1-V365, M1-D364, M1-E363, M1-E362, M1-L361, M1-G360, M1-Q359, M1-E358, M1-R357, M1-E356, M1-G355, M1-L354, M1-A353, M1-S352, M1-C351, M1-F350, M1-A349, M1-P348, M1-D347, M1-T346, M1-A345, M1-L344, M1-A343, M1-L342, M1-H341, M1-T340, M1-K339, M1-V338, M1-Y337, M1-Q336, M1-P335, M1-F334, M1-E333, M1-H332, M1-L331, M1-Q330, M1-A329, M1-G328, M1-R327, M1-Q326, M1-L325, M1-F324, M1-G323, M1-L322, M1-V321, M1-T320, M1-G319, M1-M318, M1-Q317, M1-A316, M1-M315, M1-G314, M1-P313, M1-L312, M1-G311, M1-M310, M1-V309, M1-L308, M1-D307, M1-S306, M1-T305, M1-L304, M1-W303, M1-A302, M1-E301, M1-S300, M1-A299, M1-V298, M1-W297, M1-V296, M1-K295, M1-P294, M1-S293, M1-L292, M1-R291, M1-S290, M1-S289, M1-I288, M1-S287, M1-Y286, M1-N285, M1-F284, M1-L283, M1-A282, M1-H281, M1-A280, M1-A279, M1-H278, M1-V277, M1-S276, M1-A275, M1-F274, M1-L273, M1-L272, M1-V271, M1-V270, M1-Q269, M1-V268, M1-S267, M1-S266, M1-Q265, M1-N264, M1-V263, M1-Q262, M1-H261, M1-L260, M1-V259, M1-D258, M1-Q257, M1-V256, M1-K255, M1-G254, M1-L253, M1-R252, M1-S251, M1-D250, M1-D249, M1-A248, M1-R247, M1-P246, M1-L245, M1-P244, M1-V243, M1-L242, M1-G241, M1-E240, M1-H239, M1-A238, M1-I237, M1-C236, M1-I235, M1-G234, M1-R233, M1-A232, M1-A231, M1-A230, M1-L229, M1-A228, M1-S227, M1-F226, M1-I225, M1-S224, M1-L223, M1-G222, M1-Q221, M1-R220, M1-G219, M1-Y218, M1-E217, M1-D216, M1-D215, M1-S214, M1-G213, M1-L212, M1-A211, M1-A210, M1-V209, M1-W208, M1-N207, M1-W206, M1-G205, M1-F204, M1-E203, M1-Q202, M1-L201, M1-L200, M1-E199, M1-A198, M1-A197, M1-A196, M1-T195, M1-L194, M1-Q193, M1-V192, M1-R191, M1-D190, M1-S189, M1-P188, M1-V187, M1-T186, M1-R185, M1-F184, M1-F183, M1-S182, M1-P181, M1-F180, M1-T179, M1-E178, M1-R177, M1-A176, M1-S175, M1-L174, M1-L173, M1-E172, M1-M171, M1-S170, M1-A169, M1-G168, M1-Y167, M1-S166, M1-V165, M1-Q164, M1-P163, M1-M162, M1-L161, M1-F160, M1-F159, M1-S158, M1-F157, M1-F156, M1-K155, M1-G154, M1-T153, M1-V152, M1-M151, M1-A150, M1-L149, M1-E148, M1-S147, M1-S146, M1-H145, M1-P144, M1-G143, M1-I142, M1-V141, M1-A140, M1-L139, M1-V138, M1-R137, M1-P136, M1-Q135, M1-Y134, M1-Q133, M1-T132, M1-Y131, M1-N130, M1-C129, M1-Y128, M1-A127, M1-A126, M1-I125, M1-D124, M1-R123, M1-S122, M1-G121, M1-A120, M1-K119, M1-A118, M1-L117, M1-F116, M1-M115, M1-L114, M1-S113, M1-P112, M1-K111, M1-M110, M1-A109, M1-V108, M1-V107, M1-P106, M1-E105, M1-S104, M1-C103, M1-T102, M1-D101, M1-F100, M1-L99, M1-D98, M1-Y97, M1-G96, M1-L95, M1-R94, M1-L93, M1-G92, M1-P91, M1-L90, M1-L89, M1-D88, M1-S87, M1-K86, M1-N85, M1-N84, M1-I83, M1-E82, M1-E81, M1-V80, M1-A79, M1-M78, M1-K77, M1-M76, M1-A75, M1-L74, M1-A73, M1-W72, M1-L71, M1-L70, M1-G69, M1-N68, M1-S67, M1-S66, M1-F65, M1-R64, M1-T63, M1-C62, M1-V61, M1-P60, M1-S59, M1-S58, M1-P57, M1-R56, M1-T55, M1-R54, M1-S53, M1-R52, M1-L51, M1-G50, M1-A49, M1-E48, M1-E47, M1-A46, M1-E45, M1-G44, M1-L43, M1-P42, M1-F41, M1-L40, M1-G39, M1-G38, M1-L37, M1-V36, M1-Y35, M1-D34, M1-G33, M1-K32, M1-M31, M1-R30, M1-L29, M1-Q28, M1-Q27, M1-S26, M1-L25, M1-C24, M1-L23, M1-P22, M1-A21, M1-G20, M1-T19, M1-G18, M1-P17, M1-H16, M1-L15, M1-L14, M1-A13, M1-W12, M1-L11, M1-S10, M1-L9, M1-G8, and/or M1-L7 of SEQ ID NO:2. Polynucleotide sequences encoding these polypeptides are also provided. The present invention also encompasses the use of these C-terminal HGPRBMY30_{—}1 deletion polypeptides as immunogenic and/or antigenic epitopes as described elsewhere herein.

[0183] Alternatively, preferred polypeptides of the present invention may comprise polypeptide sequences corresponding to, for example, internal regions of the HGPRBMY30_{—}1 polypeptide (e.g., any combination of both N- and C-terminal HGPRBMY30_{—}1 polypeptide deletions) of SEQ ID NO:2. For example, internal regions could be defined by the equation: amino acid NX to amino acid CX, wherein NX refers to any N-terminal deletion polypeptide amino acid of HGPRBMY30_{—}1 (SEQ ID NO:2), and where CX refers to any C-terminal deletion polypeptide amino acid of HGPRBMY30_{—}1 (SEQ ID NO:2). Polynucleotides encoding these polypeptides are also provided. The present invention also encompasses the use of these polypeptides as an immunogenic and/or antigenic epitope as described elsewhere herein.

[0184] The present invention also encompasses immunogenic and/or antigenic epitopes of the HGPRBMY30_{—}1 polypeptide.

[0185] The HGPRBMY30_{—}1 polypeptides of the present invention were determined to comprise several phosphorylation sites based upon the Motif algorithm (Genetics Computer Group, Inc.). The phosphorylation of such sites may regulate some biological activity of the HGPRBMY30_{—}1 polypeptide. For example, phosphorylation at specific sites may be involved in regulating the proteins ability to associate or bind to other molecules (e.g., proteins, ligands, substrates, DNA, etc.). In the present case, phosphorylation may modulate the ability of the HGPRBMY30_{—}1 polypeptide to associate with other polypeptides, particularly cognate ligand for HGPRBMY30_{—}1, or its ability to modulate certain cellular signal pathways.

[0186] The HGPRBMY30_{—}1 polypeptide was predicted to comprise nine PKC phosphorylation sites using the Motif algorithm (Genetics Computer Group, Inc.). In vivo, protein kinase C exhibits a preference for the phosphorylation of serine or threonine residues. The PKC phosphorylation sites have the following consensus pattern: [ST]-x-[RK], where S or T represents the site of phosphorylation and ‘x’ an intervening amino acid residue. Additional information regarding PKC phosphorylation sites can be found in Woodget J. R., Gould K. L., Hunter T., Eur. J. Biochem. 161:177-184(1986), and Kishimoto A., Nishiyama K., Nakanishi H., Uratsuji Y., Nomura H., Takeyama Y., Nishizuka Y., J. Biol. Chem. 260:12492-12499(1985); which are hereby incorporated by reference herein.

[0187] In preferred embodiments, the following PKC phosphorylation site polypeptides are encompassed by the present invention: ELAMVTGKFFSFF (SEQ ID NO:104), SMELLSARETFPS (SEQ ID NO:105), FRTVPSDRVQLTA (SEQ ID NO:106), FNYSISSRLSPKV (SEQ ID NO:107), ISSRLSPKVWVAS (SEQ ID NO:108), GRFNGSLRTERLK (SEQ ID NO:109), NGSLRTERLKIRW (SEQ ID NO:110), DCEAGSYRQNPDD (SEQ ID NO:111), and/or WSPERSTRCFRRR (SEQ ID NO:112). Polynucleotides encoding these polypeptides are also provided. The present invention also encompasses the use of the HGPRBMY30_{—}1 PKC phosphorylation site polypeptides as immunogenic and/or antigenic epitopes as described elsewhere herein.

[0188] The HGPRBMY30_{—}1 polypeptide was predicted to comprise four casein kinase II phosphorylation sites using the Motif algorithm (Genetics Computer Group, Inc.). Casein kinase II (CK-2) is a protein serine/threonine kinase whose activity is independent of cyclic nucleotides and calcium. CK-2 phosphorylates many different proteins. The substrate specificity [1] of this enzyme can be summarized as follows: (1) Under comparable conditions Ser is favored over Thr.; (2) An acidic residue (either Asp or Glu) must be present three residues from the C-terminal of the phosphate acceptor site; (3) Additional acidic residues in positions +1, +2, +4, and +5 increase the phosphorylation rate. Most physiological substrates have at least one acidic residue in these positions; (4) Asp is preferred to Glu as the provider of acidic determinants; and (5) A basic residue at the N-terminal of the acceptor site decreases the phosphorylation rate, while an acidic one will increase it.

[0189] A consensus pattern for casein kinase II phosphorylations site is as follows: [ST]-x(2)-[DE], wherein ‘x’ represents any amino acid, and S or T is the phosphorylation site.

[0190] Additional information specific to casein kinase II phosphorylation site-II domains may be found in reference to the following publication: Pinna L.A., Biochim. Biophys. Acta 1054:267-284(1990); which is hereby incorporated herein in its entirety.

[0191] In preferred embodiments, the following casein kinase II phosphorylation site polypeptide is encompassed by the present invention: YDLFDTCSEPVVAM (SEQ ID NO:113), SMELLSARETFPSF (SEQ ID NO:114), VAALGSDDEYGRQG (SEQ ID NO:115), and/or SELPLSWADRLSGC (SEQ ID NO:116). Polynucleotides encoding these polypeptides are also provided. The present invention also encompasses the use of this casein kinase II phosphorylation site polypeptide as an immunogenic and/or antigenic epitope as described elsewhere herein.

[0192] The HGPRBMY30_{—}1 polypeptide was predicted to comprise one cAMP- and cGMP-dependent protein kinase phosphorylation site using the Motif algorithm (Genetics Computer Group, Inc.). There has been a number of studies relative to the specificity of cAMP- and cGMP-dependent protein kinases. Both types of kinases appear to share a preference for the phosphorylation of serine or threonine residues found close to at least two consecutive N-terminal basic residues.

[0193] A consensus pattern for cAMP- and cGMP-dependent protein kinase phosphorylation sites is as follows: [RK](2)-x-[ST], wherein “x” represents any amino acid, and S or T is the phosphorylation site.

[0194] Additional information specific to cAMP- and cGMP-dependent protein kinase phosphorylation sites may be found in reference to the following publication: Fremisco J. R., Glass D. B., Krebs E. G, J. Biol. Chem. 255:4240-4245(1980); Glass D. B., Smith S. B., J. Biol. Chem. 258:14797-14803(1983); and Glass D. B., El-Maghrabi M. R., Pilkis S. J., J. Biol. Chem. 261:2987-2993(1986); which is hereby incorporated herein in its entirety.

[0195] In preferred embodiments, the following cAMP- and cGMP-dependent protein kinase phosphorylation site polypeptide is encompassed by the present invention: STRCFRRRSRFLAW (SEQ ID NO:117). Polynucleotides encoding this polypeptide are also provided. The present invention also encompasses the use of this cAMP- and cGMP-dependent protein kinase phosphorylation site polypeptide as an immunogenic and/or antigenic epitope as described elsewhere herein.

[0196] The HGPRBMY30_{—}1 polypeptide has been shown to comprise nine glycosylation site according to the Motif algorithm (Genetics Computer Group, Inc.). As discussed more specifically herein, protein glycosylation is thought to serve a variety of functions including: augmentation of protein folding, inhibition of protein aggregation, regulation of intracellular trafficking to organelles, increasing resistance to proteolysis, modulation of protein antigenicity, and mediation of intercellular adhesion.

[0197] Asparagine glycosylation sites have the following consensus pattern, N-{P}-[ST]-{P}, wherein N represents the glycosylation site. However, it is well known that that potential N-glycosylation sites are specific to the consensus sequence Asn-Xaa-Ser/Thr. However, the presence of the consensus tripeptide is not sufficient to conclude that an asparagine residue is glycosylated, due to the fact that the folding of the protein plays an important role in the regulation of N-glycosylation. It has been shown that the presence of proline between Asn and Ser/Thr will inhibit N-glycosylation; this has been confirmed by a recent statistical analysis of glycosylation sites, which also shows that about 50% of the sites that have a proline C-terminal to Ser/Thr are not glycosylated. Additional information relating to asparagine glycosylation may be found in reference to the following publications, which are hereby incorporated by reference herein: Marshall R. D., Annu. Rev. Biochem. 41:673-702(1972); Pless D. D., Lennarz W. J., Proc. Natl. Acad. Sci. U.S.A. 74:134-138(1977); Bause E., Biochem. J. 209:331-336(1983); Gavel Y., von Heijne G., Protein Eng. 3:433-442(1990); and Miletich J. P., Broze G. J. Jr., J. Biol. Chem. 265:11397-11404(1990).

[0198] In preferred embodiments, the following asparagine glycosylation site polypeptides are encompassed by the present invention: VEEINNKSDLLPGL (SEQ ID NO:118), IAAYCNYTQYQPRV (SEQ ID NO:119), VLHQVNQSSVQVVL (SEQ ID NO:120), AHALFNYSISSRLS (SEQ ID NO:121), CITLQNVSAGLNHH (SEQ ID NO:122), NTLQCNASGCPAQD (SEQ ID NO:123), LENMYNLTFHVGGL (SEQ ID NO:124), DVGRFNGSLRTERL (SEQ ID NO:125), and/or LAHATNATLAFLCF (SEQ ID NO:126). Polynucleotides encoding these polypeptides are also provided. The present invention also encompasses the use of these HGPRBMY30_{—}1 asparagine glycosylation site polypeptide as immunogenic and/or antigenic epitopes as described elsewhere herein.

[0199] The HGPRBMY30_{—}1 polypeptide was predicted to comprise fifteen N-myristoylation sites using the Motif algorithm (Genetics Computer Group, Inc.). An appreciable number of eukaryotic proteins are acylated by the covalent addition of myristate (a C14-saturated fatty acid) to their N-terminal residue via an amide linkage. The sequence specificity of the enzyme responsible for this modification, myristoyl CoA:protein N-myristoyl transferase (NMT), has been derived from the sequence of known N-myristoylated proteins and from studies using synthetic peptides. The specificity seems to be the following: i.) The N-terminal residue must be glycine; ii.) In position 2, uncharged residues are allowed; iii.) Charged residues, proline and large hydrophobic residues are not allowed; iv.) In positions 3 and 4, most, if not all, residues are allowed; v.) In position 5, small uncharged residues are allowed (Ala, Ser, Thr, Cys, Asn and Gly). Serine is favored; and vi.) In position 6, proline is not allowed.

[0200] A consensus pattern for N-myristoylation is as follows: G-{EDRKHPFYW}-x(2)-[STAGCN]-{P}, wherein ‘x’ represents any amino acid, and G is the N-myristoylation site.

[0201] Additional information specific to N-myristoylation sites may be found in reference to the following publication: Towler D. A., Gordon J. I., Adams S. P., Glaser L., Annu. Rev. Biochem. 57:69-99(1988); and Grand R. J. A., Biochem. J. 258:625-638(1989); which is hereby incorporated herein in its entirety.

[0202] In preferred embodiments, the following N-myristoylation site polypeptides are encompassed by the present invention: LHPGTGAPLCLSQQLR (SEQ ID NO:127), RFSSNGLLWALAMKMA (SEQ ID NO:128), SDLLPGLRLGYDLFDT (SEQ ID NO:129), LAAARGICIAHEGLVP (SEQ ID NO:130), GMAQMGTVLGFLQRGA (SEQ ID NO:131), VGRFNGSLRTERLKIR (SEQ ID NO:132), LSLALGLVLAALGLFV (SEQ ID NO:133), LVQASGGPLACFGLVC (SEQ ID NO:134), HLPLTGCLSTLFLQAA (SEQ ID NO:135), SWVSFGLAHATNATLA (SEQ ID NO:136), YNRARGLTFAMLAYFI (SEQ ID NO:137), LLCVLGILAAFHLPRC (SEQ ID NO:138), PEFFLGGGPGDAQGQN (SEQ ID NO:139), PGDAQGQNDGNTGNQG (SEQ ID NO:140), and/or QGQNDGNTGNQGKHE (SEQ ID NO:141). Polynucleotides encoding these polypeptides are also provided. The present invention also encompasses the use of these N-myristoylation site polypeptides as immunogenic and/or antigenic epitopes as described elsewhere herein.

[0203] Moreover, in confirmation of HGPRBMY30_{—}1 representing a novel GPCR, the HGPRBMY30_{—}1 polypeptide was predicted to comprise a G-protein coupled receptor motif using the Motif algorithm (Genetics Computer Group, Inc.). G-protein coupled receptors (also called R7G) are an extensive group of hormones, neurotransmitters, odorants and light receptors which transduce extracellular signals by interaction with guanine nucleotide-binding (G) proteins. Some examples of receptors that belong to this family are provided as follows: 5-hydroxytryptamine (serotonin) 1A to 1F, 2A to 2C, 4, 5A, 5B, 6 and 7, Acetylcholine, muscarinic-type, M1 to M5, Adenosine A1, A2A, A2B and A3, Adrenergic alpha-1A to -1C; alpha-2A to -2D; beta-1 to -3, Angiotensin II types I and II, Bombesin subtypes 3 and 4, Bradykinin B1 and B2, c3a and C5a anaphylatoxin, Cannabinoid CB1 and CB2, Chemokines C-C CC-CKR-1 to CC-CKR-8, Chemokines C-X-C CXC-CKR-1 to CXC-CKR-4, Cholecystokinin-A and cholecystokinin-B/gastrin, Dopamine D1 to D5, Endothelin ET-a and ET-b, fMet-Leu-Phe (fMLP) (N-formyl peptide), Follicle stimulating hormone (FSH-R), Galanin, Gastrin-releasing peptide (GRP-R), Gonadotropin-releasing hormone (GNRH-R), Histamine H1 and H2 (gastric receptor I), Lutropin-choriogonadotropic hormone (LSH-R), Melanocortin MC1R to MC5R, Melatonin, Neuromedin B (NMB-R), Neuromedin K (NK-3R), Neuropeptide Y types 1 to 6, Neurotensin (NT-R), Octopamine (tyramine) from insects, Odorants, Opioids delta-, kappa- and mu-types, Oxytocin (OT-R), Platelet activating factor (PAF-R), Prostacyclin, Prostaglandin D2, Prostaglandin E2, EP1 to EP4 subtypes, Prostaglandin F2, Purinoreceptors (ATP), Somatostatin types 1 to 5, Substance-K (NK-2R), Substance-P (NK-1R), Thrombin, Thromboxane A2, Thyrotropin (TSH-R), Thyrotropin releasing factor (TRH-R), Vasopressin V1a, V1b and V2, Visual pigments (opsins and rhodopsin), Proto-oncogene mas, Caenorhabditis elegans putative receptors C06G4.5, C38C10.1, C43C3.2,T27D1.3 and ZC84.4, Three putative receptors encoded in the genome of cytomegalovirus: US27, US28, and UL33., ECRF3, a putative receptor encoded in the genome of herpesvirus saimiri.

[0204] The structure of all GPCRs are thought to be identical. They have seven hydrophobic regions, each of which most probably spans the membrane. The N-terminus is located on the extracellular side of the membrane and is often glycosylated, while the C-terminus is cytoplasmic and generally phosphorylated. Three extracellular loops alternate with three intracellular loops to link the seven transmembrane regions. Most, but not all of these receptors, lack a signal peptide. The most conserved parts of these proteins are the transmembrane regions and the first two cytoplasmic loops. A conserved acidic-Arg-aromatic triplet is present in the N-terminal extremity of the second cytoplasmic loop and could be implicated in the interaction with G proteins.

[0205] The putative consensus sequence for GPCRs comprises the conserved triplet and also spans the major part of the third transmembrane helix, and is as follows:

[GSTALIVMFYWC]-[GSTANCPDE]-{EDPKRH }-x(2)-[LIVMNQGA]-x(2)-[LIVMFT]-[GSTANC]-[LIVMFYWSTAC]-[DENH]-R-[FYWCSH]-x(2)-[LIVM],

[0206] where “X” represents any amino acid.

[0207] Additional information relating to G-protein coupled receptors may be found in reference to the following publications: Strosberg A. D., Eur. J. Biochem. 196:1-10(1991); Kerlavage A. R., Curr. Opin. Struct. Biol. 1:394-401(1991); Probst W. C., Snyder L. A., Schuster D. I., Brosius J., Sealfon S. C., DNA Cell Biol. 11:1-20(1992); Savarese T. M., Fraser C. M., Biochem. J. 283:1-9(1992); Branchek T., Curr. Biol. 3:315-317(1993); Stiles G. L., J. Biol. Chem. 267:6451-6454(1992); Friell T., Kobilka B. K., Lefkowitz R. J., Caron M. G., Trends Neurosci. 11:321-324(1988); Stevens C. F., Curr. Biol. 1:20-22(1991); Sakurai T., Yanagisawa M., Masaki T., Trends Pharmacol. Sci. 13:103-107(1992); Salesse R., Remy J. J., Levin J. M., Jallal B., Garnier J., Biochimie 73:109-120(1991); Lancet D., Ben-Arie N., Curr. Biol. 3:668-674(1993); Uhl G. R., Childers S., Pasternak G., Trends Neurosci. 17:89-93(1994); Barnard E. A., Bumstock G., Webb T. E., Trends Pharmacol. Sci. 15:67-70(1994); Applebury M. L., Hargrave P. A., Vision Res. 26:1881-1895(1986); Attwood T. K., Eliopoulos E. E., Findlay J. B. C., Gene 98:153-159(1991); http://www.gcrdb.uthscsa.edu/; and http://swift.embl-heidelberg.de/7tm/.

[0208] In preferred embodiments, the following G-protein coupled receptors signature polypeptide is encompassed by the present invention: KGFHSCCYDCVDCEAGSYRQNPDDIACTFCGQDEW (SEQ ID NO:142). Polynucleotides encoding this polypeptide are also provided. The present invention also encompasses the use of the HGPRBMY30_{—}1 G-protein coupled receptors signature polypeptide as immunogenic and/or antigenic epitopes as described elsewhere herein.

[0209] The present invention encompasses the identification of compounds and drugs which stimulate HGPRBMY30_{—}1 on the one hand (i.e., agonists) and which inhibit the function of HGPRBMY30_{—}1 on the other hand (i.e., antagonists). In general, such screening procedures involve providing appropriate cells which express the receptor polypeptide of the present invention on the surface thereof. Such cells may include, for example, cells from mammals, yeast, Drosophila or E. coli. In a preferred embodimenta, a polynucleotide encoding the receptor of the present invention may be employed to transfect cells to thereby express the HGPRBMY30_{—}1 polypeptide. The expressed receptor may then be contacted with a test compound to observe binding, stimulation or inhibition of a functional response.

[0210] Many polynucleotide sequences, such as EST sequences, are publicly available and accessible through sequence databases. Some of these sequences are related to SEQ ID NO:1 and may have been publicly available prior to conception of the present invention. Preferably, such related polynucleotides are specifically excluded from the scope of the present invention. To list every related sequence would be cumbersome. Accordingly, preferably excluded from the present invention are one or more polynucleotides consisting of a nucleotide sequence described by the general formula of a-b, where a is any integer between 1 to 2578 of SEQ ID NO:1, b is an integer between 15 to 2592, where both a and b correspond to the positions of nucleotide residues shown in SEQ ID NO:1, and where b is greater than or equal to a+14

[0211] Features of the Polypeptide Encoded by Gene No:2

[0212] The polypeptide of this gene provided as SEQ ID NO:4 (FIGS. 2A-C), encoded by the polynucleotide sequence according to SEQ ID NO:3 (FIGS. 2A-C), and/or encoded by the polynucleotide contained within the deposited clone, HGPRBMY30_{—}2 (also referred to as GPCR99 and/or GPCR51 splice variant 2), has significant homology at the nucleotide and amino acid level to a number of G-protein coupled receptors, which include, for example, other G-protein coupled receptors, specifically, the bovine parathyroid cell calcium-sensing receptor protein (CASR_BOVIN; SWISS-PROT Accession No: P35384; SEQ ID NO:41); the human parathyroid cell calcium-sensing receptor protein (CASR_HUMAN; SWISS-PROT Accession No: P41180; SEQ ID NO:42); the mouse parathyroid cell calcium-sensing receptor protein (CASR_MOUSE; SWISS-PROT Accession No: Q9QY96; SEQ ID NO:43); the rat parathyroid cell calcium-sensing receptor protein (CASR_RAT; SWISS-PROT Accession No: P48442; SEQ ID NO:44); the human metabotropic glutamate receptor 2 precursor protein (MGR2_HUMAN; SWISS-PROT Accession No: Q14416; SEQ ID NO:45); the rat metabotropic glutamate receptor 2 precursor protein (MGR2_RAT; SWISS-PROT Accession No: P31421; SEQ ID NO:46); the Fugu calcium2+ sensing receptor protein (O73635; SWISS-PROT Accession No: O73635; SEQ ID NO:47); the Fugu pheromone receptor 1 protein (O73636; SWISS-PROT Accession No: O73636; SEQ ID NO:48); the Fugu pheromone receptor 2 protein (O73637; SWISS-PROT Accession No: O73637; SEQ ID NO:49); the Fugu pheromone receptor 3 protein (O73638; SWISS-PROT Accession No: O73638; SEQ ID NO:30); the Fugu pheromone receptor 4 protein (O73639; SWISS-PROT Accession No: O73639; SEQ ID NO:31); the Fugu pheromone receptor 5 protein (O73640; SWISS-PROT Accession No: O73640; SEQ ID NO:32); the goldfish putative odorant receptor 1 protein (O93552; SWISS-PROT Accession No: O93552; SEQ ID NO:33); the goldfish putative odorant receptor 2 protein (O93553; SWISS-PROT Accession No: O93553; SEQ ID NO:34); the mouse putative sweet taste receptor T1R1 protein (Q99PG5; SWISS-PROT Accession No: Q99PG5; SEQ ID NO:35); the mouse putative sweet taste receptor T1R1 protein (Q99PG6; SWISS-PROT Accession No: Q9EQ96; SEQ ID NO:9); the human metabotropic glutamate receptor type 2 protein (Q9H3N6; SWISS-PROT Accession No: Q9H3N6; SEQ ID NO:36); the goldfish odorant receptor 5.24 protein (Q9PW88; SWISS-PROT Accession No: Q9PW88; SEQ ID NO:37); the rat putative taste receptor TR2 protein (Q9Z0R7; SWISS-PROT Accession No: Q9Z0R7; SEQ ID NO:38); and the rat putative taste receptor TR2 protein (Q9Z0R8; SWISS-PROT Accession No: Q9Z0R8; SEQ ID NO:39). An alignment of the HGPRBMY30_{—}2, polypeptide with these proteins is provided in FIGS. 11A-K.

[0213] The determined nucleotide sequence of the HGPRBMY30_{—}2, cDNA in FIGS. 2A-C (SEQ ID NO:3) contains an open reading frame encoding a protein of about 829 amino acid residues, with a deduced molecular weight of about 90.9 kDa. The amino acid sequence of the predicted HGPRBMY30_{—}2 polypeptide is shown in FIGS. 2A-C (SEQ ID NO:4). The HGPRBMY30_{—}2 protein shown in FIGS. 2A-C was determined to share significant identity and similarity to several known G-protein coupled receptors, as shown in FIGS. 11A-K. The percent identity and similarity values between the HGPRBMY30_{—}2 polypeptide to these known G-protein coupled receptors is provided in FIG. 17.

[0214] The HGPRBMY30_{—}2 polynucleotide (SEQ ID NO:3) and polypeptide (SEQ ID NO:4) represents a novel splice variant form of the HGPBMY30 polypeptide (SEQ ID NO:86). The HGPRBMY30 polynucleotide and polypeptide are disclosed in copending U.S. application Ser. No. 60/294,411, filed May 30, 2001, which is hereby incorporated herein by reference in its entirety.

[0215] The HGPRBMY30_{—}2 polypeptide was also determined to comprise several conserved cysteines which are denoted by dark shading, in addition to other identical residues, as shown in FIGS. 11A-K. Conservation of cysteines at key amino acid residues is indicative of conserved structural features, which may correlate with conservation of protein function and/or activity.

[0216] Expression profiling designed to measure the steady state mRNA levels encoding the HGPRBMY30 polypeptide showed predominately high expression levels in the expressed highly in the testis; significantly in the heart, pituitary gland, lymph node, and to a lesser extent, in kidney, spleen, pancreas, small intestine, thymus, lung, spinal cord, bone marrow, brain, prostate (See FIG. 16). The expression profile of the HGPRBMY30_{—}2 splice variant is expected to be the same or similar to HGPRBMY30.

[0217] Based upon the strong homology to members of the G-protein coupled receptor proteins, the HGPRBMY30_{—}2 polypeptide is expected to share at least some biological activity with G-protein coupled receptors, specifically parathyroid cell calcium-sensing receptor proteins, metabotropic glutamate receptors, pheromone receptors, odorant receptors, sweet taste receptors, metabotropic glutamate receptor type 2 proteins, and more preferably with G-protein coupled receptors found within testis, heart, pituitary gland, and/or lymph node, in addition to the G-protein coupled receptors referenced elsewhere herein.

[0218] The HGPRBMY30_{—}2 polynucleotides and polypeptides of the present invention, including agonists and/or fragments thereof, have uses that include detecting, prognosing, treating, preventing, and/or ameliorating the following diseases and/or disorders, neural disorders, metabolic disorders, gastrointestinal disorders, reproductive disorders, Alzheimer's, Parkinson's, diabetes, dwarfism, color blindness, retinal pigmentosa and asthma, depression, schizophrenia, sleeplessness, hypertension, anxiety, stress, renal failure, acute heart failure, hypotension, hypertension, endocrinal diseases, growth disorders, neuropathic pain, obesity, anorexia, HIV infections, cancers, bulimia, asthma, Parkinson's disease, osteoporosis, angina pectoris, myocardial infarction, psychotic, metabolic, cardiovascular and neurological disorders. Also, compounds acting on this receptor can be used as taste modifiers.

[0219] The HGPRBMY30_{—}2 polynucleotides and polypeptides of the present invention, including agonists and/or fragments thereof, have uses that include modulating signal transduction activity, in various cells, tissues, and organisms, and particularly in mammalian testis, heart, pituitary gland, and lymph node, preferably human tissue.

[0220] The strong homology to human G-protein coupled receptors, particularly parathyroid cell calcium-sensing receptors and metabotropic glutamate receptors, combined with the predominate localized HGPRBMY30 expression in testis suggests the potential utility for HGPRBMY30_{—}2 polynucleotides and polypeptides in treating, diagnosing, prognosing, and/or preventing testicular, in addition to reproductive disorders.

[0221] In preferred embodiments, HGPRBMY30_{—}2 polynucleotides and polypeptides including agonists and fragments thereof, have uses which include treating, diagnosing, prognosing, and/or preventing the following, non-limiting, diseases or disorders of the testis: spermatogenesis, infertility, Klinefelter's syndrome, XX male, epididymitis, genital warts, germinal cell aplasia, cryptorchidism, varicocele, immotile cilia syndrome, and viral orchitis. The HGPRBMY30_{—}2 polynucleotides and polypeptides including agonists and fragments thereof, may also have uses related to modulating testicular development, embryogenesis, reproduction, and in ameliorating, treating, and/or preventing testicular proliferative disorders (e.g., cancers, which include, for example, choriocarcinoma, Nonseminoma, seminona, and testicular germ cell tumors).

[0222] Likewise, the predominate localized HGPRBMY30 expression in testis tissue also emphasizes the potential utility for HGPRBMY30_{—}2 polynucleotides and polypeptides in treating, diagnosing, prognosing, and/or preventing metabolic diseases and disorders which include the following, not limiting examples: premature puberty, incomplete puberty, Kallman syndrome, Cushing's syndrome, hyperprolacti nemi a, hemochromatosis, congenital adrenal hyperpl asia, FSH deficiency, and granulomatous disease, for example.

[0223] This gene product may also be useful in assays designed to identify binding agents, as such agents (antagonists) are useful as male contraceptive agents. The testes are also a site of active gene expression of transcripts that is expressed, particularly at low levels, in other tissues of the body. Therefore, this gene product may be expressed in other specific tissues or organs where it may play related functional roles in other processes, such as hematopoiesis, inflammation, bone formation, and kidney function, to name a few possible target indications.

[0224] The strong homology to human G-protein coupled receptors, particularly metabotropic glutamate receptor family and calcium-sensing receptor members, combined with the localized HGPRBMY30 expression in heart tissue suggests the HGPRBMY30_{—}2 polynucleotides and polypeptides may be useful in treating, diagnosing, prognosing, and/or preventing cardiovascular diseases and/or disorders, which include, but are not limited to: myocardio infarction, congestive heart failure, arrthymias, cardiomyopathy, atherosclerosis, arterialsclerosis, microvascular disease, embolism, thromobosis, pulmonary edema, palpitation, dyspnea, angina, hypotension, syncope, heart murmer, aberrant ECG, hypertrophic cardiomyopathy, the Marfan syndrome, sudden death, prolonged QT syndrome, congenital defects, cardiac viral infections, valvular heart disease, and hypertension.

[0225] Similarly, HGPRBMY30_{—}2 polynucleotides and polypeptides may be useful for ameliorating cardiovascular diseases and symptoms which result indirectly from various non-cardiavascular effects, which include, but are not limited to, the following, obesity, smoking, Down syndrome (associated with endocardial cushion defect); bony abnormalities of the upper extremities (associated with atrial septal defect in the Holt-Oram syndrome); muscular dystrophies (associated with cardiomyopathy); hemochromatosis and glycogen storage disease (associated with myocardial infiltration and restrictive cardiomyopathy); congenital deafness (associated with prolonged QT interval and serious cardiac arrhythmias); Raynaud's disease (associated with primary pulmonary hypertension and coronary vasospasm); connective tissue disorders, i.e., the Marfan syndrome, Ehlers-Danlos and Hurler syndromes, and related disorders of mucopolysaccharide metabolism (aortic dilatation, prolapsed mitral valve, a variety of arterial abnormalities); acromegaly (hypertension, accelerated coronary atherosclerosis, conduction defects, cardiomyopathy); hyperthyroidism (heart failure, atrial fibrillation); hypothyroidism (pericardial effusion, coronary artery disease); rheumatoid arthritis (pericarditis, aortic valve disease); scleroderma (cor pulmonale, myocardial fibrosis, pericarditis); systemic lupus erythematosus (valvulitis, myocarditis, pericarditis); sarcoidosis (arrhythmias, cardiomyopathy); postmenopausal effects, Chlamydial infections, polycystic ovary disease, thyroid disease, alcoholism, diet, and exfoliative dermatitis (high-output heart failure), for example.

[0226] Moreover, polynucleotides and polypeptides, including fragments and/or antagonists thereof, have uses which include, directly or indirectly, treating, preventing, diagnosing, and/or prognosing the following, non-limiting, cardiovascular infections: blood stream invasion, bacteremia, sepsis, Streptococcus pneumoniae infection, group a streptococci infection, group b streptococci infection, Enterococcus infection, nonenterococcal group D streptococci infection, nonenterococcal group C streptococci infection, nonenterococcal group G streptococci infection, Streptoccus viridans infection, Staphylococcus aureus infection, coagulase-negative staphylococci infection, gram-negative Bacilli infection, Enterobacteriaceae infection, Psudomonas spp. Infection, Acinobacter spp. Infection, Flavobacterium meningosepticum infection, Aeromonas spp. Infection, Stenotrophomonas maltophilia infection, gram-negative coccobacilli infection, Haemophilus influenza infection, Branhamella catarrhalis infection, anaerobe infection, Bacteriodes fragilis infection, Clostridium infection, fungal infection, Candida spp. Infection, non-albicans Candida spp. Infection, Hansenula anomala infection, Malassezia furfur infection, nontuberculous Mycobacteria infection, Mycobacterium avium infection, Mycobacterium chelonae infection, Mycobacterium fortuitum infection, spirochetal infection, Borrelia burgdorferi infection, in addition to any other cardiovascular disease and/or disorder (e.g., non-sepsis) implicated by the causative agents listed above or elsewhere herein.

[0227] The strong homology to human G-protein coupled receptors, particularly metabotropic glutamate receptor family and calcium-sensing receptor members, combined with the localized HGPRBMY30 expression in pituitary gland tissue suggests the HGPRBMY30 polynucleotides and polypeptides may be useful in treating, diagnosing, prognosing, and/or preventing endocrine diseases and/or disorders, which include, but are not limited to, the following: aberrant growth hormone synthesis and/or secretion, aberrant prolactin synthesis and/or secretion, aberrant luteinizing hormone synthesis and/or secretion, aberrant follicle-stimulating hormone synthesis and/or secretion, aberrant thyroid-stimulating hormone synthesis and/or secretion, aberrant adrenocorticotropin synthesis and/or secretion, aberrant vasopressin secretion, aberrant oxytocin secretion, aberrant growth, aberrant lactation, aberrant sexual characteristic development, aberrant testosterone synthesis and/or secretion, aberrant estrogen synthesis and/or secretion, aberrant water homeostasis, hypogonadism, Addison's disease, hypothyroidism, Cushing's disease, agromegaly, gigantism, lethargy, osteoporosis, aberrant calcium homeostasis, aberrant potassium homeostasis, reproductive disorders, and developmental disoders.

[0228] The strong homology to human G-protein coupled receptors, particularly metabotropic glutamate receptor family and calcium-sensing receptor members, combined with the localized HGPRBMY30 expression in lymph node tissue suggests the HGPRBMY30_{—}2 polynucleotides and polypeptides may be useful in treating, diagnosing, prognosing, and/or preventing immune diseases and/or disorders. Representative uses are described in the “Immune Activity”, “Chemotaxis”, and “Infectious Disease” sections below, and elsewhere herein. Briefly, the strong expression in immune tissue indicates a role in regulating the proliferation; survival; differentiation; and/or activation of hematopoietic cell lineages, including blood stem cells.

[0229] The HGPRBMY30_{—}2 polypeptide may also be useful as a preventative agent for immunological disorders including arthritis, asthma, immunodeficiency diseases such as AIDS, leukemia, rheumatoid arthritis, granulomatous disease, inflammatory bowel disease, sepsis, acne, neutropenia, neutrophilia, psoriasis, hypersensitivities, such as T-cell mediated cytotoxicity; immune reactions to transplanted organs and tissues, such as host-versus-graft and graft-versus-host diseases, or autoimmunity disorders, such as autoimmune infertility, lense tissue injury, demyelination, systemic lupus erythematosis, drug induced hemolytic anemia, rheumatoid arthritis, Sjogren's disease, and scleroderma. The HGPRBMY30_{—}2 polypeptide may be useful for modulating cytokine production, antigen presentation, or other processes, such as for boosting immune responses, etc.

[0230] Moreover, the protein may represent a secreted factor that influences the differentiation or behavior of other blood cells, or that recruits hematopoietic cells to sites of injury. Thus, this gene product is thought to be useful in the expansion of stem cells and committed progenitors of various blood lineages, and in the differentiation and/or proliferation of various cell types. Furthermore, the protein may also be used to determine biological activity, raise antibodies, as tissuemarkers, to isolate cognate ligands or receptors, to identify agents that modulate their interactions, in addition to its use as a nutritional supplement. Protein, as well as, antibodies directed against the protein may show utility as a tumor marker and/or immunotherapy targets for the above listed tissues.

[0231] The HGPRBMY30_{—}2 polynucleotides and polypeptides, including fragments and agonists thereof, may have uses which include, either directly or indirectly, for boosting immune responses.

[0232] The HGPRBMY30_{—}2 polynucleotides and polypeptides, including fragments and /or modulators thereof, may have uses which include identification of modulators of HGPRBMY30_{—}2 function including antibodies (for detection or neutralization), naturally-occurring modulators and small molecule modulators. Antibodies to domains of the HGPRBMY30_{—}2 protein could be used as diagnostic agents of reproductive and inflammatory conditions in patients, are useful in monitoring the activation of signal transduction pathways, and can be used as a biomarker for the involvement of G-protein couplded receptors in disease states, and in the evaluation of inhibitors of G-protein coupled receptors in vivo.

[0233] HGPRBMY30_{—}2 polypeptides and polynucleotides have additional uses which include diagnosing diseases related to the over and/or under expression of HGPRBMY30_{—}2 by identifying mutations in the HGPRBMY30_{—}2 gene by using HGPRBMY30_{—}2 sequences as probes or by determining HGPRBMY30_{—}2 protein or mRNA expression levels. HGPRBMY30_{—}2 polypeptides may be useful for screening compounds that affect the activity of the protein. HGPRBMY30_{—}2 peptides can also be used for the generation of specific antibodies and as bait in yeast two hybrid screens to find proteins the specifically interact with HGPRBMY30_{—}2 (described elsewhere herein).

[0234] Although it is believed the encoded polypeptide may share at least some biological activities with human G-protein coupled receptor proteins (particularly G-protein coupled receptors belonging to the metabotropic glutamate receptor and calcium-sensing receptor protein families), a number of methods of determining the exact biological function of this clone are either known in the art or are described elsewhere herein. Briefly, the function of this clone may be determined by applying microarray methodology. Nucleic acids corresponding to the HGPRBMY30_{—}2 polynucleotides, in addition to, other clones of the present invention, may be arrayed on microchips for expression profiling. Depending on which polynucleotide probe is used to hybridize to the slides, a change in expression of a specific gene may provide additional insight into the function of this gene based upon the conditions being studied. For example, an observed increase or decrease in expression levels when the polynucleotide probe used comes from diseased testis tissue, as compared to, normal tissue might indicate a function in modulating immune function, for example. In the case of HGPRBMY30_{—}2, testis, heart, pituitary gland, lymph node, kidney, spleen, pancreas, small intestine, thymus, lung, spinal cord, bone marrow, brain, and/or prostate tissue should be used, for example, to extract RNA to prepare the probe.

[0235] In addition, the function of the protein may be assessed by applying quantitative PCR methodology, for example. Real time quantitative PCR would provide the capability of following the expression of the HGPRBMY30_{—}2 gene throughout development, for example. Quantitative PCR methodology requires only a nominal amount of tissue from each developmentally important step is needed to perform such experiments. Therefore, the application of quantitative PCR methodology to refining the biological function of this polypeptide is encompassed by the present invention. In the case of HGPRBMY30_{—}2, a disease correlation related to HGPRBMY30_{—}2 may be made by comparing the mRNA expression level of HGPRBMY30_{—}2 in normal tissue, as compared to diseased tissue (particularly diseased tissue isolated from the following: testis, heart, pituitary gland, lymph node, kidney, spleen, pancreas, small intestine, thymus, lung, spinal cord, bone marrow, brain, and/or prostate tissue). Significantly higher or lower levels of HGPRBMY30_{—}2 expression in the diseased tissue may suggest HGPRBMY30_{—}2 plays a role in disease progression, and antagonists against HGPRBMY30_{—}2 polypeptides would be useful therapeutically in treating, preventing, and/or ameliorating the disease. Alternatively, significantly higher or lower levels of HGPRBMY30_{—}2 expression in the diseased tissue may suggest HGPRBMY30_{—}2 plays a defensive role against disease progression, and agonists of HGPRBMY30_{—}2 polypeptides may be useful therapeutically in treating, preventing, and/or ameliorating the disease. Also encompassed by the present invention are quantitative PCR probes corresponding to the polynucleotide sequence provided as SEQ ID NO:3 (FIGS. 1A-D).

[0236] The function of the protein may also be assessed through complementation assays in yeast. For example, in the case of the HGPRBMY30_{—}2, transforming yeast deficient in metabotropic glutamate receptor or calcium-sensing receptor G-protein coupled receptor activity, for example, and assessing their ability to grow would provide convincing evidence the HGPRBMY30_{—}2 polypeptide has metabotropic glutamate receptor or calcium-sensing receptor G-protein coupled receptor activity. Additional assay conditions and methods that may be used in assessing the function of the polynucleotides and polypeptides of the present invention are known in the art, some of which are disclosed elsewhere herein.

[0237] Alternatively, the biological function of the encoded polypeptide may be determined by disrupting a homologue of this polypeptide in Mice and/or rats and observing the resulting phenotype. Such knock-out experiments are known in the art, some of which are disclosed elsewhere herein.

[0238] Moreover, the biological function of this polypeptide may be determined by the application of antisense and/or sense methodology and the resulting generation of transgenic mice and/or rats. Expressing a particular gene in either sense or antisense orientation in a transgenic mouse or rat could lead to respectively higher or lower expression levels of that particular gene. Altering the endogenous expression levels of a gene can lead to the observation of a particular phenotype that can then be used to derive indications on the function of the gene. The gene can be either over-expressed or under expressed in every cell of the organism at all times using a strong ubiquitous promoter, or it could be expressed in one or more discrete parts of the organism using a well characterized tissue-specific promoter (e.g., testis, heart, pituitary gland, lymph node, kidney, spleen, pancreas, small intestine, thymus, lung, spinal cord, bone marrow, brain, and/or prostate-tissue specific promoter), or it can be expressed at a specified time of development using an inducible and/or a developmentally regulated promoter.

[0239] In the case of HGPRBMY30_{—}2 transgenic mice or rats, if no phenotype is apparent in normal growth conditions, observing the organism under diseased conditions (reproductive, cardiovascular, endocrine, immune, renal, gastrointestinal, pulmonary, and/or neural disorders, in addition to cancers, etc.) may lead to understanding the function of the gene. Therefore, the application of antisense and/or sense methodology to the creation of transgenic mice or rats to refine the biological function of the polypeptide is encompassed by the present invention.

[0240] In preferred embodiments, the following N-terminal HGPRBMY30_{—}2 deletion polypeptides are encompassed by the present invention: M1-E829, L2-E829, G3-E829, P4-E829, A5-E829, V6-E829, L7-E829, G8-E829, L9-E829, S10-E829, L11-E829, W12-E829, A13-E829, L14-E829, L15-E829, H16-E829, P17-E829, G18-E829, T19-E829, G20-E829, A21-E829, P22-E829, L23-E829, C24-E829, L25-E829, S26-E829, Q27-E829, Q28-E829, L29-E829, R30-E829, M31-E829, K32-E829, G33-E829, D34-E829, Y35-E829, V36-E829, L37-E829, G38-E829, G39-E829, L40-E829, F41-E829, P42-E829, L43-E829, G44-E829, E45-E829, A46-E829, E47-E829, E48-E829, A49-E829, G50-E829, L51-E829, R52-E829, S53-E829, R54-E829, T55-E829, R56-E829, P57-E829, S58-E829, S59-E829, P60-E829, V61-E829, C62-E829, T63-E829, R64-E829, F65-E829, S66-E829, S67-E829, N68-E829, G69-E829, L70-E829, L71-E829, W72-E829, A73-E829, L74-E829, A75-E829, M76-E829, K77-E829, M78-E829, A79-E829, V80-E829, E81-E829, E82-E829, I83-E829, N84-E829, N85-E829, K86-E829, S87-E829, D88-E829, L89-E829, L90-E829, P91-E829, G92-E829, L93-E829, R94-E829, L95-E829, G96-E829, Y97-E829, D98-E829, L99-E829, F100-E829, D101-E829, T102-E829, C103-E829, S104-E829, E105-E829, P106-E829, V107-E829, V108-E829, A109-E829, M110-E829, K111-E829, P112-E829, S113-E829, L114-E829, M115-E829, F116-E829, L117-E829, A118-E829, K119-E829, A120-E829, G121-E829, S122-E829, R123-E829, D124-E829, I125-E829, A126-E829, A127-E829, Y128-E829, C129-E829, N130-E829, Y131-E829, T132-E829, Q133-E829, Y134-E829, Q135-E829, P136-E829, R137-E829, V138-E829, L139-E829, A140-E829, V141-E829, I142-E829, G143-E829, P144-E829, H145-E829, S146-E829, S147-E829, E148-E829, L149-E829, A150-E829, M151-E829, V152-E829, T153-E829, G154-E829, K155-E829, F156-E829, F157-E829, S158-E829, F159-E829, F160-E829, L161-E829, M162-E829, P163-E829, Q164-E829, V165-E829, S166-E829, Y167-E829, G168-E829, A169-E829, S170-E829, M171-E829, E172-E829, L173-E829, L174-E829, S175-E829, A176-E829, R177-E829, E178-E829, T179-E829, F180-E829, P181-E829, S182-E829, F183-E829, F184-E829, R185-E829, T186-E829, V187-E829, P188-E829, S189-E829, D190-E829, R191-E829, V192-E829, Q193-E829, L194-E829, T195-E829, A196-E829, A197-E829, A198-E829, E199-E829, L200-E829, L201-E829, Q202-E829, E203-E829, F204-E829, G205-E829, W206-E829, N207-E829, W208-E829, V209-E829, A210-E829, A211-E829, L212-E829, G213-E829, S214-E829, D215-E829, D216-E829, E217-E829, Y218-E829, G219-E829, R220-E829, Q221-E829, G222-E829, L223-E829, S224-E829, I225-E829, F226-E829, S227-E829, A228-E829, L229-E829, A230-E829, A231-E829, A232-E829, R233-E829, G234-E829, I235-E829, C236-E829, I237-E829, A238-E829, H239-E829, E240-E829, G241-E829, L242-E829, V243-E829, P244-E829, L245-E829, P246-E829, R247-E829, A248-E829, D249-E829, D250-E829, S251-E829, R252-E829, L253-E829, G254-E829, K255-E829, V256-E829, Q257-E829, D258-E829, V259-E829, L260-E829, H261-E829, Q262-E829, V263-E829, N264-E829, Q265-E829, S266-E829, S267-E829, V268-E829, Q269-E829, V270-E829, V271-E829, L272-E829, L273-E829, F274-E829, A275-E829, S276-E829, V277-E829, H278-E829, A279-E829, A280-E829, H281-E829, A282-E829, L283-E829, F284-E829, N285-E829, Y286-E829, S287-E829, I288-E829, S289-E829, S290-E829, R291-E829, L292-E829, S293-E829, P294-E829, K295-E829, V296-E829, W297-E829, V298-E829, A299-E829, S300-E829, E301-E829, A302-E829, W303-E829, L304-E829, T305-E829, S306-E829, D307-E829, L308-E829, V309-E829, M310-E829, G311-E829, L312-E829, P313-E829, G314-E829, M315-E829, A316-E829, Q317-E829, M318-E829, G319-E829, T320-E829, V321-E829, L322-E829, G323-E829, F324-E829, L325-E829, Q326-E829, R327-E829, G328-E829, A329-E829, Q330-E829, L331-E829, H332-E829, E333-E829, F334-E829, P335E829, Q336-E829, Y337-E829, V338-E829, K339-E829, T340-E829, H341-E829, L342-E829, A343-E829, L344-E829, A345-E829, T346-E829, D347-E829, P348-E829, A349-E829, F350-E829, C351-E829, S352-E829, A353-E829, L354-E829, G355-E829, E356-E829, R357-E829, E358-E829, Q359-E829, G360-E829, L361-E829, E362-E829, E363-E829, D364-E829, V365-E829, V366-E829, G367-E829, Q368-E829, R369-E829, C370-E829, P371-E829, Q372-E829, C373-E829, D374-E829, C375-E829, I376-E829, T377-E829, L378-E829, Q379-E829, N380-E829, V381-E829, S382-E829, A383-E829, G384-E829, L385-E829, N386-E829, H387-E829, H388-E829, Q389-E829, T390-E829, F391-E829, S392-E829, V393-E829, Y394-E829, A395-E829, A396-E829, V397-E829, Y398-E829, S399-E829, V400-E829, A401-E829, Q402-E829, A403-E829, L404-E829, H405-E829, N406-E829, T407-E829, L408-E829, Q409-E829, C410-E829, N411-E829, A412-E829, S413-E829, G414-E829, C415-E829, P416-E829, A417-E829, Q418-E829, D419-E829, P420-E829, V421-E829, K422-E829, P423-E829, W424-E829, Q425-E829, L426-E829, L427-E829, E428-E829, N429-E829, M430-E829, Y431-E829, N432-E829, L433-E829, T434-E829, F435-E829, H436-E829, V437-E829, G438-E829, G439-E829, L440-E829, P441-E829, L442-E829, R443-E829, F444-E829, D445-E829, S446-E829, S447-E829, G448-E829, N449-E829, V450-E829, D451-E829, M452-E829, E453-E829, Y454-E829, D455-E829, L456-E829, K457-E829, L458-E829, W459-E829, V460-E829, W461-E829, Q462-E829, G463-E829, S464-E829, V465-E829, P466-E829, R467-E829, LA68-E829, H469-E829, D470-E829, V471-E829, G472-E829, R473-E829, F474-E829, N475-E829, G476-E829, S477-E829, L478-E829, R479-E829, T480-E829, E481-E829, R482-E829, L483-E829, K484-E829, I485-E829, R486-E829, W487-E829, H488-E829, T489-E829, S490-E829, D491-E829, N492-E829, Q493-E829, V494-E829, P495-E829, V496-E829, S497-E829, R498-E829, C499-E829, S500-E829, R501-E829, Q502-E829, C503-E829, Q504-E829, E505-E829, G506-E829, Q507-E829, V508-E829, R509-E829, R510-E829, V511-E829, K512-E829, G513-E829, F514-E829, H515-E829, S516-E829, C517-E829, C518-E829, Y519-E829, D520-E829, C521-E829, V522-E829, D523-E829, C524-E829, E525-E829, A526-E829, G527-E829, S528-E829, Y529-E829, R530-E829, Q531-E829, N532-E829, P533-E829, D534-E829, D535-E829, I536-E829, A537-E829, C538-E829, T539-E829, F540-E829, C541-E829, G542-E829, Q543-E829, D544-E829, E545-E829, W546-E829, S547-E829, P548-E829, E549-E829, R550-E829, S551-E829, T552-E829, R553-E829, C554-E829, F555-E829, R556-E829, R557-E829, R558-E829, S559-E829, R560-E829, F561-E829, L562-E829, A563-E829, W564-E829, G565-E829, E566-E829, P567-E829, A568-E829, V569-E829, L570-E829, L571-E829, L572-E829, L573-E829, L574-E829, L575-E829, L576-E829, S577-E829, L578-E829, A579-E829, L580-E829, G581-E829, L582-E829, V583-E829, L584-E829, A585-E829, A586-E829, L587-E829, G588-E829, L589-E829, F590-E829, V591-E829, H592-E829, H593-E829, R594-E829, D595-E829, S596-E829, P597-E829, L598-E829, V599-E829, Q600-E829, A601-E829, S602-E829, G603-E829, G604-E829, P605-E829, L606-E829, A607-E829, C608-E829, F609-E829, G610-E829, L611-E829, V612-E829, C613-E829, L614-E829, G615-E829, L616-E829, V617-E829, C618-E829, L619-E829, S620-E829, V621-E829, L622-E829, L623-E829, F624-E829, P625-E829, G626-E829, Q627-E829, P628-E829, S629-E829, P630-E829, A631-E829, R632-E829, C633-E829, L634-E829, A635-E829, Q636-E829, Q637-E829, P638-E829, L639-E829, S640-E829, H641-E829, L642-E829, P643-E829, L644-E829, T645-E829, G646-E829, C647-E829, L648-E829, S649-E829, T650-E829, L651-E829, F652-E829, L653-E829, and/or R654-E829 of SEQ ID NO:4. Polynucleotide sequences encoding these polypeptides are also provided. The present invention also encompasses the use of these N-terminal HGPRBMY30_{—}2 deletion polypeptides as immunogenic and/or antigenic epitopes as described elsewhere herein.

[0241] In preferred embodiments, the following C-terminal HGPRBMY30_{—}2 deletion polypeptides are encompassed by the present invention: M1-E829, M1-H828, M1-K827, M1-G826, M1-Q825, M1-N824, M1-G823, M1-T822, M1-N821, M1-G820, M1-D819, M1-N818, M1-Q817, M1-G816, M1-Q815, M1-A814, M1-D813, M1-G812, M1-P811, M1-G810, M1-G809, M1-G808, M1-L807, M1-F806, M1-F805, M1-E804, M1-P803, M1-T802, M1-N801, M1-L800, M1-G799, M1-P798, M1-Q797, M1-R796, M1-M795, M1-L794, M1-L793, M1-Y792, M1-C791, M1-R790, M1-P789, M1-L788, M1-H787, M1-F786, M1-A785, M1-A784, M1-L783, M1-I782, M1-G781, M1-L780, M1-V779, M1-C778, M1-L777, M1-L776, M1-L775, M1-A774, M1-G773, M1-M772, M1-Q771, M1-V770, M1-A769, M1-P768, M1-R767, M1-L766, M1-V765, M1-V764, M1-Q763, M1-V762, M1-N761, M1-A760, M1-L759, M1-L758, M1-P757, M1-V756, M1-F755, M1-S754, M1-V753, M1-W752, M1-T751, M1-I750, M1-F749, M1-Y748, M1-A747, M1-L746, M1-M745, M1-A744, M1-F743, M1-T742, M1-L741, M1-G740, M1-R739, M1-A738, M1-R737, M1-N736, M1-Y735, M1-R734, M1-G733, M1-P732, M1-Q731, M1-S730, M1-R729, M1-V728, M1-L727, M1-F726, M1-T725, M1-G724, M1-L723, M1-F722, M1-C721, M1-L720, M1-F719, M1-A718, M1-L717, M1-T716, M1-A715, M1-N714, M1-T713, M1-A712, M1-H711, M1-A710, M1-L709, M1-G708, M1-F707, M1-S706, M1-V705, M1-W704, M1-S703, M1-R702, M1-T701, M1-R700, M1-C699, M1-H698, M1-V697, M1-L696, M1-A695, M1-E694, M1-T693, M1-P692, M1-L691, M1-M690, M1-H689, M1-W688, M1-D687, M1-T686, M1-V685, M1-V684, M1-E683, M1-P682, M1-P681, M1-F680, M1-A679, M1-V678, M1-L677, M1-Y676, M1-W675, M1-T674, M1-C673, M1-L672, M1-A671, M1-V670, M1-E669, M1-V668, M1-L667, M1-M666, M1-A665, M1-L664, M1-L663, M1-V662, M1-V661, M1-L660, M1-W659, M1-A658, M1-W657, M1-P656, M1-G655, M1-R654, M1-L653, M1-F652, M1-L651, M1-T650, M1-S649, M1-L648, M1-C647, M1-G646, M1-T645, M1-L644, M1-P643, M1-L642, M1-H641, M1-S640, M1-L639, M1-P638, M1-Q637, M1-Q636, M1-A635, M1-L634, M1-C633, M1-R632, M1-A631, M1-P630, M1-S629, M1-P628, M1-Q627, M1-G626, M1-P625, M1-F624, M1-L623, M1-L622, M1-V621, M1-S620, M1-L619, M1-C618, M1-V617, M1-L616, M1-G615, M1-L614, M1-C613, M1-V612, M1-L611, M1-G610, M1-F609, M1-C608, M1-A607, M1-L606, M1-P605, M1-G604, M1-G603, M1-S602, M1-A601, M1-Q600, M1-V599, M1-L598, M1-P597, M1-S596, M1-D595, M1-R594, M1-H593, M1-H592, M1-V591, M1-F590, M1-L589, M1-G588, M1-L587, M1-A586, M1-A585, M1-L584, M1-V583, M1-L582, M1-G581, M1-L580, M1-A579, M1-L578, M1-S577, M1-L576, M1-L575, M1-L574, M1-L573, M1-L572, M1-L571, M1-L570, M1-V569, M1-A568, M1-P567, M1-E566, M1-G565, M1-W564, M1-A563, M1-L562, M1-F561, M1-R560, M1-S559, M1-R558, M1-R557, M1-R556, M1-F555, M1-C554, M1-R553, M1-T552, M1-S551, M1-R550, M1-E549, M1-P548, M1-S547, M1-W546, M1-E545, M1-D544, M1-Q543, M1-G542, M1-C541, M1-F540, M1-T539, M1-C538, M1-A537, M1-I536, M1-D535, M1-D534, M1-P533, M1-N532, M1-Q531, M1-R530, M1-Y529, M1-S528, M1-G527, M1-A526, M1-E525, M1-C524, M1-D523, M1-V522, M1-C521, M1-D520, M1-Y519, M1-C518, M1-C517, M1-S516, M1-H515, M1-F514, M1-G513, M1-K512, M1-V511, M1-R510, M1-R509, M1-V508, M1-Q507, M1-G506, M1-E505, M1-Q504, M1-C503, M1-Q502, M1-R501, M1-S500, M1-C499, M1-R498, M1-S497, M1-V496, M1-P495, M1-V494, M1-Q493, M1-N492, M1-D491, M1-S490, M1-T489, M1-H488, M1-W487, M1-R486, M1-I485, M1-K484, M1-L483, M1-R482, M1-E481, M1-T480, M1-R479, M1-L478, M1-S477, M1-G476, M1-N475, M1-F474, M1-R473, M1-G472, M1-V471, M1-D470, M1-H469, M1-L468, M1-R467, M1-P466, M1-V465, M1-S464, M1-G463, M1-Q462, M1-W461, M1-V460, M1-W459, M1-L458, M1-K457, M1-L456, M1-D455, M1-Y454, M1-E453, M1-M452, M1-D451, M1-V450, M1-N449, M1-G448, M1-S447, M1-S446, M1-D445, M1-F444, M1-R443, M1-L442, M1-P441, M1-L440, M1-G439, M1-G438, M1-V437, M1-H436, M1-F435, M1-T434, M1-L433, M1-N432, M1-Y431, M1-M430, M1-N429, M1-E428, M1-L427, M1-L426, M1-Q425, M1-W424, M1-P423, M1-K422, M1-V421, M1-P420, M1-D419, M1-Q418, M1-A417, M1-P416, M1-C415, M1-G414, M1-S413, M1-A412, M1-N411, M1-C410, M1-Q409, M1-L408, M1-T407, M1-N406, M1-H405, M1-L404, M1-A403, M1-Q402, M1-A401, M1-V400, M1-S399, M1-Y398, M1-V397, M1-A396, M1-A395, M1-Y394, M1-V393, M1-S392, M1-F391, M1-T390, M1-Q389, M1-H388, M1-H387, M1-N386, M1-L385, M1-G384, M1-A383, M1-S382, M1-V381, M1-N380, M1-Q379, M1-L378, M1-T377, M1-I376, M1-C375, M1-D374, M1-C373, M1-Q372, M1-P371, M1-C370, M1-R369, M1-Q368, M1-G367, M1-V366, M1-V365, M1-D364, M1-E363, M1-E362, M1-L361, M1-G360, M1-Q359, M1-E358, M1-R357, M1-E356, M1-G355, M1-L354, M1-A353, M1-S352, M1-C351, M1-F350, M1-A349, M1-P348, M1-D347, M1-T346, M1-A345, M1-L344, M1-A343, M1-L342, M1-H341, M1-T340, M1-K339, M1-V338, M1-Y337, M1-Q336, M1-P335, M1-F334, M1-E333, M1-H332, M1-L331, M1-Q330, M1-A329, M1-G328, M1-R327, M1-Q326, M1-L325, M1-F324, M1-G323, M1-L322, M1-V321, M1-T320, M1-G319, M1-M318, M1-Q317, M1-A316, M1-M315, M1-G314, M1-P313, M1-L312, M1-G311, M1-M310, M1-V309, M1-L308, M1-D307, M1-S306, M1-T305, M1-L304, M1-W303, M1-A302, M1-E301, M1-S300, M1-A299, M1-V298, M1-W297, M1-V296, M1-K295, M1-P294, M1-S293, M1-L292, M1-R291, M1-S290, M1-S289, M1-I288, M1-S287, M1-Y286, M1-N285, M1-F284, M1-L283, M1-A282, M1-H281, M1-A280, M1-A279, M1-H278, M1-V277, M1-S276, M1-A275, M1-F274, M1-L273, M1-L272, M1-V271, M1-V270, M1-Q269, M1-V268, M1-S267, M1-S266, M1-Q265, M1-N264, M1-V263, M1-Q262, M1-H261, M1-L260, M1-V259, M1-D258, M1-Q257, M1-V256, M1-K255, M1-G254, M1-L253, M1-R252, M1-S251, M1-D250, M1-D249, M1-A248, M1-R247, M1-P246, M1-L245, M1-P244, M1-V243, M1-L242, M1-G241, M1-E240, M1-H239, M1-A238, M1-I237, M1-C236, M1-I235, M1-G234, M1-R233, M1-A232, M1-A231, M1-A230, M1-L229, M1-A228, M1-S227, M1-F226, M1-I225, M1-S224, M1-L223, M1-G222, M1-Q221, M1-R220, M1-G219, M1-Y218, M1-E217, M1-D216, M1-D215, M1-S214, M1-G213, M1-L212, M1-A211, M1-A210, M1-V209, M1-W208, M1-N207, M1-W206, M1-G205, M1-F204, M1-E203, M1-Q202, M1-L201, M1-L200, M1-E199, M1-A198, M1-A197, M1-A196, M1-T195, M1-L194, M1-Q193, M1-V192, M1-R191, M1-D190, M1-S189, M1-P188, M1-V187, M1-T186, M1-R185, M1-F184, M1-F183, M1-S182, M1-P181, M1-F180, M1-T179, M1-E178, M1-R177, M1-A176, M1-S175, M1-L174, M1-L173, M1-E172, M1-M171, M1-S170, M1-A169, M1-G168, M1-Y167, M1-S166, M1-V165, M1-Q164, M1-P163, M1-M162, M1-L161, M1-F160, M1-F159, M1-S158, M1-F157, M1-F156, M1-K155, M1-G154, M1-T153, M1-V152, M1-M151, M1-A150, M1-L149, M1-E148, M1-S147, M1-S146, M1-H145, M1-P144, M1-G143, M1-I142, M1-V141, M1-A140, M1-L139, M1-V138, M1-R137, M1-P136, M1-Q135, M1-Y134, M1-Q133, M1-T132, M1-Y131, M1-N130, M1-C129, M1-Y128, M1-A127, M1-A126, M1-I125, M1-D124, M1-R123, M1-S122, M1-G121, M1-A120, M1-K119, M1-A118, M1-L117, M1-F116, M1-M115, M1-L114, M1-S113, M1-P112, M1-K111, M1-M110, M1-A109, M1-V108, M1-V107, M1-P106, M1-E105, M1-S104, M1-C103, M1-T102, M1-D101, M1-F100, M1-L99, M1-D98, M1-Y97, M1-G96, M1-L95, M1-R94, M1-L93, M1-G92, M1-P91, M1-L90, M1-L89, M1-D88, M1-S87, M1-K86, M1-N85, M1-N84, M1-I83, M1-E82, M1-E81, M1-V80, M1-A79, M1-M78, M1-K77, M1-M76, M1-A75, M1-L74, M1-A73, M1-W72, M1-L71, M1-L70, M1-G69, M1-N68, M1-S67, M1-S66, M1-F65, M1-R64, M1-T63, M1-C62, M1-V61, M1-P60, M1-S59, M1-S58, M1-P57, M1-R56, M1-T55, M1-R54, M1-S53, M1-R52, M1-L51, M1-G50, M1-A49, M1-E48, M1-E47, M1-A46, M1-E45, M1-G44, M1-L43, M1-P42, M1-F41, M1-L40, M1-G39, M1-G38, M1-L37, M1-V36, M1-Y35, M1-D34, M1-G33, M1-K32, M1-M31, M1-R30, M1-L29, M1-Q28, M1-Q27, M1-S26, M1-L25, M1-C24, M1-L23, M1-P22, M1-A21, M1-G20, M1-T19, M1-G18, M1-P17, M1-H16, M1-L15, M1-L14, M1-A13, M1-W12, M1-L 11, M1-S10, M1-L9, M1-G8, and/or M1-L7 of SEQ ID NO:4. Polynucleotide sequences encoding these polypeptides are also provided. The present invention also encompasses the use of these C-terminal HGPRBMY30_{—}2 deletion polypeptides as immunogenic and/or antigenic epitopes as described elsewhere herein.

[0242] Alternatively, preferred polypeptides of the present invention may comprise polypeptide sequences corresponding to, for example, internal regions of the HGPRBMY30_{—}2 polypeptide (e.g., any combination of both N- and C-terminal HGPRBMY30_{—}2 polypeptide deletions) of SEQ ID NO:4. For example, internal regions could be defined by the equation: amino acid NX to amino acid CX, wherein NX refers to any N-terminal deletion polypeptide amino acid of HGPRBMY30_{—}2 (SEQ ID NO:4), and where CX refers to any C-terminal deletion polypeptide amino acid of HGPRBMY30_{—}2 (SEQ ID NO:4). Polynucleotides encoding these polypeptides are also provided. The present invention also encompasses the use of these polypeptides as an immunogenic and/or antigenic epitope as described elsewhere herein.

[0243] The present invention also encompasses immunogenic and/or antigenic epitopes of the HGPRBMY30_{—}2 polypeptide.

[0244] The HGPRBMY30_{—}2 polypeptides of the present invention were determined to comprise several phosphorylation sites based upon the Motif algorithm (Genetics Computer Group, Inc.). The phosphorylation of such sites may regulate some biological activity of the HGPRBMY30_{—}2 polypeptide. For example, phosphorylation at specific sites may be involved in regulating the proteins ability to associate or bind to other molecules (e.g., proteins, ligands, substrates, DNA, etc.). In the present case, phosphorylation may modulate the ability of the HGPRBMY30_{—}2 polypeptide to associate with other polypeptides, particularly cognate ligand for HGPRBMY30_{—}2, or its ability to modulate certain cellular signal pathways.

[0245] The HGPRBMY30_{—}2 polypeptide was predicted to comprise nine PKC phosphorylation sites using the Motif algorithm (Genetics Computer Group, Inc.). In vivo, protein kinase C exhibits a preference for the phosphorylation of serine or threonine residues. The PKC phosphorylation sites have the following consensus pattern: [ST]-x-[RK], where S or T represents the site of phosphorylation and ‘x’ an intervening amino acid residue. Additional information regarding PKC phosphorylation sites can be found in Woodget J. R., Gould K. L., Hunter T., Eur. J. Biochem. 161:177-184(1986), and Kishimoto A., Nishiyama K., Nakanishi H., Uratsuji Y., Nomura H., Takeyama Y., Nishizuka Y., J. Biol. Chem. 260:12492-12499(1985); which are hereby incorporated by reference herein.

[0246] In preferred embodiments, the following PKC phosphorylation site polypeptides are encompassed by the present invention: ELAMVTGKFFSFF (SEQ ID NO:143), SMELLSARETFPS (SEQ ID NO:144), FRTVPSDRVQLTA (SEQ ID NO:145), FNYSISSRLSPKV (SEQ ID NO:146), ISSRLSPKVWVAS (SEQ ID NO:147), GRFNGSLRTERLK (SEQ ID NO:148), NGSLRTERLKIRW (SEQ ID NO:149), DCEAGSYRQNPDD (SEQ ID NO:150), and/or WSPERSTRCFRRR (SEQ ID NO:151). Polynucleotides encoding these polypeptides are also provided. The present invention also encompasses the use of the HGPRBMY30_{—}2 PKC phosphorylation site polypeptides as immunogenic and/or antigenic epitopes as described elsewhere herein.

[0247] The HGPRBMY30_{—}2 polypeptide was predicted to comprise three casein kinase II phosphorylation sites using the Motif algorithm (Genetics Computer Group, Inc.). Casein kinase II (CK-2) is a protein serine/threonine kinase whose activity is independent of cyclic nucleotides and calcium. CK-2 phosphorylates many different proteins. The substrate specificity [1] of this enzyme can be summarized as follows: (1) Under comparable conditions Ser is favored over Thr.; (2) An acidic residue (either Asp or Glu) must be present three residues from the C-terminal of the phosphate acceptor site; (3) Additional acidic residues in positions +1, +2, +4, and +5 increase the phosphorylation rate. Most physiological substrates have at least one acidic residue in these positions; (4) Asp is preferred to Glu as the provider of acidic determinants; and (5) A basic residue at the N-terminal of the acceptor site decreases the phosphorylation rate, while an acidic one will increase it.

[0248] A consensus pattern for casein kinase II phosphorylations site is as follows: [ST]-x(2)-[DE], wherein ‘x’ represents any amino acid, and S or T is the phosphorylation site.

[0249] Additional information specific to casein kinase II phosphorylation site-II domains may be found in reference to the following publication: Pinna L. A., Biochim. Biophys. Acta 1054:267-284(1990); which is hereby incorporated herein in its entirety.

[0250] In preferred embodiments, the following casein kinase II phosphorylation site polypeptide is encompassed by the present invention: YDLFDTCSEPVVAM (SEQ ID NO:152), SMELLSARETFPSF (SEQ ID NO:153), and/or VAALGSDDEYGRQG (SEQ ID NO:154). Polynucleotides encoding these polypeptides are also provided. The present invention also encompasses the use of this casein kinase II phosphorylation site polypeptide as an immunogenic and/or antigenic epitope as described elsewhere herein.

[0251] The HGPRBMY30_{—}2 polypeptide was predicted to comprise one cAMP- and cGMP-dependent protein kinase phosphorylation site using the Motif algorithm (Genetics Computer Group, Inc.). There has been a number of studies relative to the specificity of cAMP- and cGMP-dependent protein kinases. Both types of kinases appear to share a preference for the phosphorylation of serine or threonine residues found close to at least two consecutive N-terminal basic residues.

[0252] A consensus pattern for cAMP- and cGMP-dependent protein kinase phosphorylation sites is as follows: [RK](2)-x-[ST], wherein “x” represents any amino acid, and S or T is the phosphorylation site.

[0253] Additional information specific to cAMP- and cGMP-dependent protein kinase phosphorylation sites may be found in reference to the following publication: Fremisco J. R., Glass D. B., Krebs E. G, J. Biol. Chem. 255:4240-4245(1980); Glass D. B., Smith S. B., J. Biol. Chem. 258:14797-14803(1983); and Glass D. B., El-Maghrabi M. R., Pilkis S. J., J. Biol. Chem. 261:2987-2993(1986); which is hereby incorporated herein in its entirety.

[0254] In preferred embodiments, the following cAMP- and cGMP-dependent protein kinase phosphorylation site polypeptide is encompassed by the present invention: STRCFRRRSRFLAW (SEQ ID NO:155). Polynucleotides encoding this polypeptide are also provided. The present invention also encompasses the use of this cAMP- and cGMP-dependent protein kinase phosphorylation site polypeptide as an immunogenic and/or antigenic epitope as described elsewhere herein.

[0255] The HGPRBMY30_{—}2 polypeptide has been shown to comprise nine glycosylation site according to the Motif algorithm (Genetics Computer Group, Inc.). As discussed more specifically herein, protein glycosylation is thought to serve a ariety of functions including: augmentation of protein folding, inhibition of protein aggregation, regulation of intracellular trafficking to organelles, increasing resistance to proteolysis, modulation of protein antigenicity, and mediation of intercellular adhesion.

[0256] Asparagine glycosylation sites have the following consensus pattern, N-{P}-[ST]-{P}, wherein N represents the glycosylation site. However, it is well known that that potential N-glycosylation sites are specific to the consensus sequence Asn-Xaa-Ser/Thr. However, the presence of the consensus tripeptide is not sufficient to conclude that an asparagine residue is glycosylated, due to the fact that the folding of the protein plays an important role in the regulation of N-glycosylation. It has been shown that the presence of proline between Asn and Ser/Thr will inhibit N-glycosylation; this has been confirmed by a recent statistical analysis of glycosylation sites, which also shows that about 50% of the sites that have a proline C-terminal to Ser/Thr are not glycosylated. Additional information relating to asparagine glycosylation may be found in reference to the following publications, which are hereby incorporated by reference herein: Marshall R. D., Annu. Rev. Biochem. 41:673-702(1972); Pless D. D., Lennarz W. J., Proc. Natl. Acad. Sci. U.S.A. 74:134-138(1977); Bause E., Biochem. J. 209:331-336(1983); Gavel Y., von Heijne G., Protein Eng. 3:433-442(1990); and Miletich J. P., Broze G. J. Jr., J. Biol. Chem. 265:11397-11404(1990).

[0257] In preferred embodiments, the following asparagine glycosylation site polypeptides are encompassed by the present invention: VEEINNKSDLLPGL (SEQ ID NO:156), IAAYCNYTQYQPRV (SEQ ID NO:157), VLHQVNQSSVQVVL (SEQ ID NO:158), AHALFNYSISSRLS (SEQ ID NO:159), CITLQNVSAGLNHH (SEQ ID NO:160), NTLQCNASGCPAQD (SEQ ID NO:161), LENMYNLTFHVGGL (SEQ ID NO:162), DVGRFNGSLRTERL (SEQ ID NO:163), and/or LAHATNATLAFLCF (SEQ ID NO:164). Polynucleotides encoding these polypeptides are also provided. The present invention also encompasses the use of these HGPRBMY30_{—}2 asparagine glycosylation site polypeptide as immunogenic and/or antigenic epitopes as described elsewhere herein.

[0258] The HGPRBMY30_{—}2 polypeptide was predicted to comprise fifteen N-myristoylation sites using the Motif algorithm (Genetics Computer Group, Inc.). An appreciable number of eukaryotic proteins are acylated by the covalent addition of myristate (a C14-saturated fatty acid) to their N-terminal residue via an amide linkage. The sequence specificity of the enzyme responsible for this modification, myristoyl CoA:protein N-myristoyl transferase (NMT), has been derived from the sequence of known N-myristoylated proteins and from studies using synthetic peptides. The specificity seems to be the following: i.) The N-terminal residue must be glycine; ii.) In position 2, uncharged residues are allowed; iii.) Charged residues, proline and large hydrophobic residues are not allowed; iv.) In positions 3 and 4, most, if not all, residues are allowed; v.) In position 5, small uncharged residues are allowed (Ala, Ser, Thr, Cys, Asn and Gly). Serine is favored; and vi.) In position 6, proline is not allowed.

[0259] A consensus pattern for N-myristoylation is as follows: G-{EDRKHPFYW}-x(2)-[STAGCN]-{P}, wherein ‘x’ represents any amino acid, and G is the N-myristoylation site.

[0260] Additional information specific to N-myristoylation sites may be found in reference to the following publication: Towler D. A., Gordon J. I., Adams S. P., Glaser L., Annu. Rev. Biochem. 57:69-99(1988); and Grand R. J. A., Biochem. J. 258:625-638(1989); which is hereby incorporated herein in its entirety.

[0261] In preferred embodiments, the following N-myristoylation site polypeptides are encompassed by the present invention: LHPGTGAPLCLSQQLR (SEQ ID NO:165), RFSSNGLLWALAMKMA (SEQ ID NO:166), SDLLPGLRLGYDLFDT (SEQ ID NO:167), LAAARGICIAHEGLVP (SEQ ID NO:168), GMAQMGTVLGFLQRGA (SEQ ID NO:169), VGRFNGSLRTERLKIR (SEQ ID NO:170), LSLALGLVLAALGLFV (SEQ ID NO:171), LVQASGGPLACFGLVC (SEQ ID NO:172), HLPLTGCLSTLFLRGP (SEQ ID NO:173), SWVSFGLAHATNATLA (SEQ ID NO:174), YNRARGLTFAMLAYFI (SEQ ID NO:175), LLCVLGILAAFHLPRC (SEQ ID NO:176), PEFFLGGGPGDAQGQN (SEQ ID NO:177), PGDAQGQNDGNTGNQG (SEQ ID NO:178), and/or QGQNDGNTGNQGKHE (SEQ ID NO:179). Polynucleotides encoding these polypeptides are also provided. The present invention also encompasses the use of these N-myristoylation site polypeptides as immunogenic and/or antigenic epitopes as described elsewhere herein.

[0262] Moreover, in confirmation of HGPRBMY30_{—}2 representing a novel GPCR, the HGPRBMY30_{—}2polypeptide was predicted to comprise a G-protein coupled receptor motif using the Motif algorithm (Genetics Computer Group, Inc.). G-protein coupled receptors (also called R7G) are an extensive group of hormones, neurotransmitters, odorants and light receptors which transduce extracellular signals by interaction with guanine nucleotide-binding (G) proteins. Some examples of receptors that belong to this family are provided as follows: 5-hydroxytryptamine (serotonin) 1A to 1F, 2A to 2C, 4, 5A, 5B, 6 and 7, Acetylcholine, muscarinic-type, M1 to M5, Adenosine A1, A2A, A2B and A3, Adrenergic alpha-1A to -1C; alpha-2A to -2D; beta-1 to -3, Angiotensin II types I and II, Bombesin subtypes 3 and 4, Bradykinin B1 and B2, c3a and C5a anaphylatoxin, Cannabinoid CB1 and CB2, Chemokines C-C CC-CKR-1 to CC-CKR-8, Chemokines C-X-C CXC-CKR-1 to CXC-CKR-4, Cholecystokinin-A and cholecystokinin-B/gastrin, Dopamine D1 to D5, Endothelin ET-a and ET-b, fMet-Leu-Phe (fMLP) (N-formyl peptide), Follicle stimulating hormone (FSH-R), Galanin, Gastrin-releasing peptide (GRP-R), Gonadotropin-releasing hormone (GNRH-R), Histamine H1 and H2 (gastric receptor I), Lutropin-choriogonadotropic hormone (LSH-R), Melanocortin MC1R to MC5R, Melatonin, Neuromedin B (NMB-R), Neuromedin K (NK-3R), Neuropeptide Y types 1 to 6, Neurotensin (NT-R), Octopamine (tyramine) from insects, Odorants, Opioids delta-, kappa- and mu-types, Oxytocin (OT-R), Platelet activating factor (PAF-R), Prostacyclin, Prostaglandin D2, Prostaglandin E2, EP1 to EP4 subtypes, Prostaglandin F2, Purinoreceptors (ATP), Somatostatin types 1 to 5, Substance-K (NK-2R), Substance-P (NK-1R), Thrombin, Thromboxane A2, Thyrotropin (TSH-R), Thyrotropin releasing factor (TRH-R), Vasopressin V1a, V1b and V2, Visual pigments (opsins and rhodopsin), Proto-oncogene mas, Caenorhabditis elegans putative receptors C06G4.5, C38C10.1, C43C3.2,T27D1.3 and ZC84.4, Three putative receptors encoded in the genome of cytomegalovirus: US27, US28, and UL33., ECRF3, a putative receptor encoded in the genome of herpesvirus saimiri.

[0263] The structure of all GPCRs are thought to be identical. They have seven hydrophobic regions, each of which most probably spans the membrane. The N-terminus is located on the extracellular side of the membrane and is often glycosylated, while the C-terminus is cytoplasmic and generally phosphorylated. Three extracellular loops alternate with three intracellular loops to link the seven transmembrane regions. Most, but not all of these receptors, lack a signal peptide. The most conserved parts of these proteins are the transmembrane regions and the first two cytoplasmic loops. A conserved acidic-Arg-aromatic triplet is present in the N-terminal extremity of the second cytoplasmic loop and could be implicated in the interaction with G proteins.

[0264] The putative consensus sequence for GPCRs comprises the conserved triplet and also spans the major part of the third transmembrane helix, and is as follows:

[GSTALIVMFYWC]-[GSTANCPDE]-{EDPKRH}-x(2)-[LIVMNQGA]-x(2)-[LIVMFT]-[GSTANC]-[LIVMFYWSTAC]-[DENH]-R-[FYWCSH]-x(2)-[LIVM],

[0265] where “X” represents any amino acid.

[0266] Additional information relating to G-protein coupled receptors may be found in reference to the following publications: Strosberg A. D., Eur. J. Biochem. 196:1-10(1991); Kerlavage A. R., Curr. Opin. Struct. Biol. 1:394-401(1991); Probst W. C., Snyder L. A., Schuster D. I., Brosius J., Sealfon S. C., DNA Cell Biol. 11:1-20(1992); Savarese T. M., Fraser C. M., Biochem. J. 283:1-9(1992); Branchek T., Curr. Biol. 3:315-317(1993); Stiles G. L., J. Biol. Chem. 267:6451-6454(1992); Friell T., Kobilka B. K., Lefkowitz R. J., Caron M. G., Trends Neurosci. 11:321-324(1988); Stevens C. F., Curr. Biol. 1:20-22(1991); Sakurai T., Yanagisawa M., Masaki T., Trends Pharmacol. Sci. 13:103-107(1992); Salesse R., Remy J. J., Levin J. M., Jallal B., Garnier J., Biochimie 73:109-120(1991); Lancet D., Ben-Arie N., Curr. Biol. 3:668-674(1993); Uhl G. R., Childers S., Pasternak G., Trends Neurosci. 17:89-93(1994); Barnard E. A., Burnstock G., Webb T. E., Trends Pharmacol. Sci. 15:67-70(1994); Applebury M. L., Hargrave P. A., Vision Res. 26:1881-1895(1986); Attwood T. K., Eliopoulos E. E., Findlay J. B. C., Gene 98:153-159(1991); http://www.gcrdb.uthscsa.edu/; and http://swift.embl-heidelberg.de/7tm/.

[0267] In preferred embodiments, the following G-protein coupled receptors signature polypeptide is encompassed by the present invention: KGFHSCCYDCVDCEAGSYRQNPDDIACTFCGQDEW (SEQ ID NO:180). Polynucleotides encoding this polypeptide are also provided. The present invention also encompasses the use of the HGPRBMY30_{—}2 G-protein coupled receptors signature polypeptide as immunogenic and/or antigenic epitopes as described elsewhere herein.

[0268] The present invention encompasses the identification of compounds and drugs which stimulate HGPRBMY30_{—}2 on the one hand (i.e., agonists) and which inhibit the function of HGPRBMY30_{—}2 on the other hand (i.e., antagonists). In general, such screening procedures involve providing appropriate cells which express the receptor polypeptide of the present invention on the surface thereof. Such cells may include, for example, cells from mammals, yeast, Drosophila or E. coli. In a preferred embodimenta, a polynucleotide encoding the receptor of the present invention may be employed to transfect cells to thereby express the HGPRBMY30_{—}2 polypeptide. The expressed receptor may then be contacted with a test compound to observe binding, stimulation or inhibition of a functional response.

[0269] Many polynucleotide sequences, such as EST sequences, are publicly available and accessible through sequence databases. Some of these sequences are related to SEQ ID NO:3 and may have been publicly available prior to conception of the present invention. Preferably, such related polynucleotides are specifically excluded from the scope of the present invention. To list every related sequence would be cumbersome. Accordingly, preferably excluded from the present invention are one or more polynucleotides consisting of a nucleotide sequence described by the general formula of a-b, where a is any integer between 1 to 2476 of SEQ ID NO:3, b is an integer between 15 to 2490, where both a and b correspond to the positions of nucleotide residues shown in SEQ ID NO:3, and where b is greater than or equal to a+14

[0270] Features of the Polypeptide Encoded by Gene No:3

[0271] The polypeptide of this gene provided as SEQ ID NO:6 (FIGS. 3A-C), encoded by the polynucleotide sequence according to SEQ ID NO:5 (FIGS. 3A-C), and/or encoded by the polynucleotide contained within the deposited clone, HGPRBMY30_{—}3 (also referred to as GPCR99 and/or GPCR51 splice variant 3), has significant homology at the nucleotide and amino acid level to a number of G-protein coupled receptors, which include, for example, other G-protein coupled receptors, specifically, the bovine parathyroid cell calcium-sensing receptor protein (CASR_BOVIN; SWISS-PROT Accession No: P35384; SEQ ID NO:61); the human parathyroid cell calcium-sensing receptor protein (CASR_HUMAN; SWISS-PROT Accession No: P41180; SEQ ID NO:62); the mouse parathyroid cell calcium-sensing receptor protein (CASR_MOUSE; SWISS-PROT Accession No: Q9QY96; SEQ ID NO:63); the rat parathyroid cell calcium-sensing receptor protein (CASR_RAT; SWISS-PROT Accession No: P48442; SEQ ID NO:64); the human metabotropic glutamate receptor 2 precursor protein (MGR2_HUMAN; SWISS-PROT Accession No: Q14416; SEQ ID NO:65); the rat metabotropic glutamate receptor 2 precursor protein (MGR2_RAT; SWISS-PROT Accession No: P31421; SEQ ID NO:66); the Fugu calcium2+ sensing receptor protein (O73635; SWISS-PROT Accession No: 073635; SEQ ID NO:67); the Fugu pheromone receptor 1 protein (O73636; SWISS-PROT Accession No: O73636; SEQ ID NO:68); the Fugu pheromone receptor 2 protein (O73637; SWISS-PROT Accession No: O73637; SEQ ID NO:69); the Fugu pheromone receptor 3 protein (O73638; SWISS-PROT Accession No: O73638; SEQ ID NO:50); the Fugu pheromone receptor 4 protein (O73639; SWISS-PROT Accession No: O73639; SEQ ID NO:51); the Fugu pheromone receptor 5 protein (O73640; SWISS-PROT Accession No: O73640; SEQ ID NO:52); the goldfish putative odorant receptor 1 protein (O93552; SWISS-PROT Accession No: O93552; SEQ ID NO:53); the goldfish putative odorant receptor 2 protein (O93553; SWISS-PROT Accession No:O 93553; SEQ ID NO:54); the mouse putative sweet taste receptor T1R1 protein (Q99PG5; SWISS-PROT Accession No: Q99PG5; SEQ ID NO:55); the mouse putative sweet taste receptor T1R1 protein (Q99PG6; SWISS-PROT Accession No: Q9EQ96; SEQ ID NO:9); the human metabotropic glutamate receptor type 2 protein (Q9H3N6; SWISS-PROT Accession No: Q9H3N6; SEQ ID NO:56); the goldfish odorant receptor 5.24 protein (Q9PW88; SWISS-PROT Accession No: Q9PW88; SEQ ID NO:57); the rat putative taste receptor TR2 protein (Q9Z0R7; SWISS-PROT Accession No: Q9Z0R7; SEQ ID NO:58); and the rat putative taste receptor TR2 protein (Q9Z0R8; SWISS-PROT Accession No: Q9Z0R8; SEQ ID NO:59). An alignment of the HGPRBMY30_{—}3, polypeptide with these proteins is provided in FIGS. 11A-K.

[0272] The determined nucleotide sequence of the HGPRBMY30_{—3}, cDNA in FIGS. 3A-C (SEQ ID NO:5) contains an open reading frame encoding a protein of about 894 amino acid residues, with a deduced molecular weight of about 97.9 kDa. The amino acid sequence of the predicted HGPRBMY30_{—}3 polypeptide is shown in FIGS. 3A-C (SEQ ID NO:6). The HGPRBMY30_{—}3 protein shown in FIGS. 3A-C was determined to share significant identity and similarity to several known G-protein coupled receptors, as shown in FIGS. 11A-K. The percent identity and similarity values between the HGPRBMY30 _{—}3 polypeptide to these known G-protein coupled receptors is provided in FIG. 17.

[0273] The HGPRBMY30_{—}3 polynucleotide (SEQ ID NO:5) and polypeptide (SEQ ID NO:6) represents a novel splice variant form of the HGPBMY30 polypeptide (SEQ ID NO:86). The HGPRBMY30 polynucleotide and polypeptide are disclosed in copending U.S. application Ser. No. 60/294,411, filed May 30, 2001, which is hereby incorporated herein by reference in its entirety.

[0274] The HGPRBMY30_{—}3 polypeptide was also determined to comprise several conserved cysteines which are denoted by dark shading, in addition to other identical residues, as shown in FIGS. 11A-K. Conservation of cysteines at key amino acid residues is indicative of conserved structural features, which may correlate with conservation of protein function and/or activity.

[0275] Expression profiling designed to measure the steady state mRNA levels encoding the HGPRBMY30 polypeptide showed predominately high expression levels in the expressed highly in the testis; significantly in the heart, pituitary gland, lymph node, and to a lesser extent, in kidney, spleen, pancreas, small intestine, thymus, lung, spinal cord, bone marrow, brain, prostate (See FIG. 16). The expression profile of the HGPRBMY30_{—}3 splice variant is expected to be the same or similar to HGPRBMY30.

[0276] Based upon the strong homology to members of the G-protein coupled receptor proteins, the HGPRBMY30_{—}3 polypeptide is expected to share at least some biological activity with G-protein coupled receptors, specifically parathyroid cell calcium-sensing receptor proteins, metabotropic glutamate receptors, pheromone receptors, odorant receptors, sweet taste receptors, metabotropic glutamate receptor type 2 proteins, and more preferably with G-protein coupled receptors found within testis, heart, pituitary gland, and/or lymph node, in addition to the G-protein coupled receptors referenced elsewhere herein.

[0277] The HGPRBMY30_{—}3 polynucleotides and polypeptides of the present invention, including agonists and/or fragments thereof, have uses that include detecting, prognosing, treating, preventing, and/or ameliorating the following diseases and/or disorders, neural disorders, metabolic disorders, gastrointestinal disorders, reproductive disorders, Alzheimer's, Parkinson's, diabetes, dwarfism, color blindness, retinal pigmentosa and asthma, depression, schizophrenia, sleeplessness, hypertension, anxiety, stress, renal failure, acute heart failure, hypotension, hypertension, endocrinal diseases, growth disorders, neuropathic pain, obesity, anorexia, HIV infections, cancers, bulimia, asthma, Parkinson's disease, osteoporosis, angina pectoris, myocardial infarction, psychotic, metabolic, cardiovascular and neurological disorders. Also, compounds acting on this receptor can be used as taste modifiers.

[0278] The HGPRBMY30_{—}3 polynucleotides and polypeptides of the present invention, including agonists and/or fragments thereof, have uses that include modulating signal transduction activity, in various cells, tissues, and organisms, and particularly in mammalian testis, heart, pituitary gland, and lymph node, preferably human tissue.

[0279] The strong homology to human G-protein coupled receptors, particularly parathyroid cell calcium-sensing receptors and metabotropic glutamate receptors, combined with the predominate localized HGPRBMY30 expression in testis suggests the potential utility for HGPRBMY30_{—}3 polynucleotides and polypeptides in treating, diagnosing, prognosing, and/or preventing testicular, in addition to reproductive disorders.

[0280] In preferred embodiments, HGPRBMY30_{—}3 polynucleotides and polypeptides including agonists and fragments thereof, have uses which include treating, diagnosing, prognosing, and/or preventing the following, non-limiting, diseases or disorders of the testis: spermatogenesis, infertility, Klinefelter's syndrome, XX male, epididymitis, genital warts, germinal cell aplasia, cryptorchidism, varicocele, immotile cilia syndrome, and viral orchitis. The HGPRBMY30_{—}3 polynucleotides and polypeptides including agonists and fragments thereof, may also have uses related to modulating testicular development, embryogenesis, reproduction, and in ameliorating, treating, and/or preventing testicular proliferative disorders (e.g., cancers, which include, for example, choriocarcinoma, Nonseminoma, seminona, and testicular germ cell tumors).

[0281] Likewise, the predominate localized HGPRBMY30 expression in testis tissue also emphasizes the potential utility for HGPRBMY30_{—}3 polynucleotides and polypeptides in treating, diagnosing, prognosing, and/or preventing metabolic diseases and disorders which include the following, not limiting examples: premature puberty, incomplete puberty, Kallman syndrome, Cushing's syndrome, hyperprolactinemia, hemochromatosis, congenital adrenal hyperplasia, FSH deficiency, and granulomatous disease, for example.

[0282] This gene product may also be useful in assays designed to identify binding agents, as such agents (antagonists) are useful as male contraceptive agents. The testes are also a site of active gene expression of transcripts that is expressed, particularly at low levels, in other tissues of the body. Therefore, this gene product may be expressed in other specific tissues or organs where it may play related functional roles in other processes, such as hematopoiesis, inflammation, bone formation, and kidney function, to name a few possible target indications.

[0283] The strong homology to human G-protein coupled receptors, particularly metabotropic glutamate receptor family and calcium-sensing receptor members, combined with the localized HGPRBMY30 expression in heart tissue suggests the HGPRBMY30_{—}3 polynucleotides and polypeptides may be useful in treating, diagnosing, prognosing, and/or preventing cardiovascular diseases and/or disorders, which include, but are not limited to: myocardio infarction, congestive heart failure, arrthymias, cardiomyopathy, atherosclerosis, arterialsclerosis, microvascular disease, embolism, thromobosis, pulmonary edema, palpitation, dyspnea, angina, hypotension, syncope, heart murmer, aberrant ECG, hypertrophic cardiomyopathy, the Marfan syndrome, sudden death, prolonged QT syndrome, congenital defects, cardiac viral infections, valvular heart disease, and hypertension.

[0284] Similarly, HGPRBMY30_{—}3 polynucleotides and polypeptides may be useful for ameliorating cardiovascular diseases and symptoms which result indirectly from various non-cardiavascular effects, which include, but are not limited to, the following, obesity, smoking, Down syndrome (associated with endocardial cushion defect); bony abnormalities of the upper extremities (associated with atrial septal defect in the Holt-Oram syndrome); muscular dystrophies (associated with cardiomyopathy); hemochromatosis and glycogen storage disease (associated with myocardial infiltration and restrictive cardiomyopathy); congenital deafness (associated with prolonged QT interval and serious cardiac arrhythmias); Raynaud's disease (associated with primary pulmonary hypertension and coronary vasospasm); connective tissue disorders, i.e., the Marfan syndrome, Ehlers-Danlos and Hurler syndromes, and related disorders of mucopolysaccharide metabolism (aortic dilatation, prolapsed mitral valve, a variety of arterial abnormalities); acromegaly (hypertension, accelerated coronary atherosclerosis, conduction defects, cardiomyopathy); hyperthyroidism (heart failure, atrial fibrillation); hypothyroidism (pericardial effusion, coronary artery disease); rheumatoid arthritis (pericarditis, aortic valve disease); scleroderma (cor pulmonale, myocardial fibrosis, pericarditis); systemic lupus erythematosus (valvulitis, myocarditis, pericarditis); sarcoidosis (arrhythmias, cardiomyopathy); postmenopausal effects, Chlamydial infections, polycystic ovary disease, thyroid disease, alcoholism, diet, and exfoliative dermatitis (high-output heart failure), for example.

[0285] Moreover, polynucleotides and polypeptides, including fragments and/or antagonists thereof, have uses which include, directly or indirectly, treating, preventing, diagnosing, and/or prognosing the following, non-limiting, cardiovascular infections: blood stream invasion, bacteremia, sepsis, Streptococcus pneumoniae infection, group a streptococci infection, group b streptococci infection, Enterococcus infection, nonenterococcal group D streptococci infection, nonenterococcal group C streptococci infection, nonenterococcal group G streptococci infection, Streptoccus viridans infection, Staphylococcus aureus infection, coagulase-negative staphylococci infection, gram-negative Bacilli infection, Enterobacteriaceae infection, Psudomonas spp. Infection, Acinobacter spp. Infection, Flavobacterium meningosepticum infection, Aeromonas spp. Infection, Stenotrophomonas maltophilia infection, gram-negative coccobacilli infection, Haemophilus influenza infection, Branhamella catarrhalis infection, anaerobe infection, Bacteriodes fragilis infection, Clostridium infection, fungal infection, Candida spp. Infection, non-albicans Candida spp. Infection, Hansenula anomala infection, Malassezia furfur infection, nontuberculous Mycobacteria infection, Mycobacterium avium infection, Mycobacterium chelonae infection, Mycobacterium fortuitum infection, spirochetal infection, Borrelia burgdorferi infection, in addition to any other cardiovascular disease and/or disorder (e.g., non-sepsis) implicated by the causative agents listed above or elsewhere herein.

[0286] The strong homology to human G-protein coupled receptors, particularly metabotropic glutamate receptor family and calcium-sensing receptor members, combined with the localized HGPRBMY30 expression in pituitary gland tissue suggests the HGPRBMY30 polynucleotides and polypeptides may be useful in treating, diagnosing, prognosing, and/or preventing endocrine diseases and/or disorders, which include, but are not limited to, the following: aberrant growth hormone synthesis and/or secretion, aberrant prolactin synthesis and/or secretion, aberrant luteinizing hormone synthesis and/or secretion, aberrant follicle-stimulating hormone synthesis and/or secretion, aberrant thyroid-stimulating hormone synthesis and/or secretion, aberrant adrenocorticotropin synthesis and/or secretion, aberrant vasopressin secretion, aberrant oxytocin secretion, aberrant growth, aberrant lactation, aberrant sexual characteristic development, aberrant testosterone synthesis and/or secretion, aberrant estrogen synthesis and/or secretion, aberrant water homeostasis, hypogonadism, Addison's disease, hypothyroidism, Cushing's disease, agromegaly, gigantism, lethargy, osteoporosis, aberrant calcium homeostasis, aberrant potassium homeostasis, reproductive disorders, and developmental disoders.

[0287] The strong homology to human G-protein coupled receptors, particularly metabotropic glutamate receptor family and calcium-sensing receptor members, combined with the localized HGPRBMY30 expression in lymph node tissue suggests the HGPRBMY30_{—}3 polynucleotides and polypeptides may be useful in treating, diagnosing, prognosing, and/or preventing immune diseases and/or disorders. Representative uses are described in the “Immune Activity”, “Chemotaxis”, and “Infectious Disease” sections below, and elsewhere herein. Briefly, the strong expression in immune tissue indicates a role in regulating the proliferation; survival; differentiation; and/or activation of hematopoietic cell lineages, including blood stem cells.

[0288] The HGPRBMY30_{—}3 polypeptide may also be useful as a preventative agent for immunological disorders including arthritis, asthma, immunodeficiency diseases such as AIDS, leukemia, rheumatoid arthritis, granulomatous disease, inflammatory bowel disease, sepsis, acne, neutropenia, neutrophilia, psoriasis, hypersensitivities, such as T-cell mediated cytotoxicity; immune reactions to transplanted organs and tissues, such as host-versus-graft and graft-versus-host diseases, or autoimmunity disorders, such as autoimmune infertility, lense tissue injury, demyelination, systemic lupus erythematosis, drug induced heniolytic anemia, rheumatoid arthritis, Sjogren's disease, and scieroderma. The HGPRBMY30_{—}3 polypeptide may be useful for modulating cytokine production, antigen presentation, or other processes, such as for boosting immune responses, etc.

[0289] Moreover, the protein may represent a secreted factor that influences the differentiation or behavior of other blood cells, or that recruits hematopoietic cells to sites of injury. Thus, this gene product is thought to be useful in the expansion of stem cells and committed progenitors of various blood lineages, and in the differentiation and/or proliferation of various cell types. Furthermore, the protein may also be used to determine biological activity, raise antibodies, as tissuemarkers, to isolate cognate ligands or receptors, to identify agents that modulate their interactions, in addition to its use as a nutritional supplement. Protein, as well as, antibodies directed against the protein may show utility as a tumor marker and/or immunotherapy targets for the above listed tissues.

[0290] The HGPRBMY30_{—}3 polynucleotides and polypeptides, including fragments and agonists thereof, may have uses which include, either directly or indirectly, for boosting immune responses.

[0291] The HGPRBMY30_{—}3 polynucleotides and polypeptides, including fragments and/or modulators thereof, may have uses which include identification of modulators of HGPRBMY30_{—}3 function including antibodies (for detection or neutralization), naturally-occurring modulators and small molecule modulators. Antibodies to domains of the HGPRBMY30_{—}3 protein could be used as diagnostic agents of reproductive and inflammatory conditions in patients, are useful in monitoring the activation of signal transduction pathways, and can be used as a biomarker for the involvement of G-protein couplded receptors in disease states, and in the evaluation of inhibitors of G-protein coupled receptors in vivo.

[0292] HGPRBMY30_{—}3 polypeptides and polynucleotides have additional uses which include diagnosing diseases related to the over and/or under expression of HGPRBMY30_{—}3 by identifying mutations in the HGPRBMY30_{—}3 gene by using HGPRBMY30_{—}3 sequences as probes or by determining HGPRBMY30_{—}3 protein or mRNA expression levels. HGPRBMY30_{—}3 polypeptides may be useful for screening compounds that affect the activity of the protein. HGPRBMY30_{—}3 peptides can also be used for the generation of specific antibodies and as bait in yeast two hybrid screens to find proteins the specifically interact with HGPRBMY30_{—}3 (described elsewhere herein).

[0293] Although it is believed the encoded polypeptide may share at least some biological activities with human G-protein coupled receptor proteins (particularly G-protein coupled receptors belonging to the metabotropic glutamate receptor and calcium-sensing receptor protein families), a number of methods of determining the exact biological function of this clone are either known in the art or are described elsewhere herein. Briefly, the function of this clone may be determined by applying microarray methodology. Nucleic acids corresponding to the HGPRBMY30_{—}3 polynucleotides, in addition to, other clones of the present invention, may be arrayed on microchips for expression profiling. Depending on which polynucleotide probe is used to hybridize to the slides, a change in expression of a specific gene may provide additional insight into the function of this gene based upon the conditions being studied. For example, an observed increase or decrease in expression levels when the polynucleotide probe used comes from diseased testis tissue, as compared to, normal tissue might indicate a function in modulating immune function, for example. In the case of HGPRBMY30_{—}3, testis, heart, pituitary gland, lymph node, kidney, spleen, pancreas, small intestine, thymus, lung, spinal cord, bone marrow, brain, and/or prostate tissue should be used, for example, to extract RNA to prepare the probe.

[0294] In addition, the function of the protein may be assessed by applying quantitative PCR methodology, for example. Real time quantitative PCR would provide the capability of following the expression of the HGPRBMY30_{—}3 gene throughout development, for example. Quantitative PCR methodology requires only a nominal amount of tissue from each developmentally important step is needed to perform such experiments. Therefore, the application of quantitative PCR methodology to refining the biological function of this polypeptide is encompassed by the present invention. In the case of HGPRBMY30_{—}3, a disease correlation related to HGPRBMY30_{—}3 may be made by comparing the mRNA expression level of HGPRBMY30_{—}3 in normal tissue, as compared to diseased tissue (particularly diseased tissue isolated from the following: testis, heart, pituitary gland, lymph node, kidney, spleen, pancreas, small intestine, thymus, lung, spinal cord, bone marrow, brain, and/or prostate tissue). Significantly higher or lower levels of HGPRBMY30_{—}3 expression in the diseased tissue may suggest HGPRBMY30_{—}3 plays a role in disease progression, and antagonists against HGPRBMY30_{—}3 polypeptides would be useful therapeutically in treating, preventing, and/or ameliorating the disease. Alternatively, significantly higher or lower levels of HGPRBMY30_{—}3 expression in the diseased tissue may suggest HGPRBMY30_{—}3 plays a defensive role against disease progression, and agonists of HGPRBMY30_{—}3 polypeptides may be useful therapeutically in treating, preventing, and/or ameliorating the disease. Also encompassed by the present invention are quantitative PCR probes corresponding to the polynucleotide sequence provided as SEQ ID NO:5 (FIGS. 1A-D).

[0295] The function of the protein may also be assessed through complementation assays in yeast. For example, in the case of the HGPRBMY30_{—}3, transforming yeast deficient in metabotropic glutamate receptor or calcium-sensing receptor G-protein coupled receptor activity, for example, and assessing their ability to grow would provide convincing evidence the HGPRBMY30_{—}3 polypeptide has metabotropic glutamate receptor or calcium-sensing receptor G-protein coupled receptor activity. Additional assay conditions and methods that may be used in assessing the function of the polynucleotides and polypeptides of the present invention are known in the art, some of which are disclosed elsewhere herein.

[0296] Alternatively, the biological function of the encoded polypeptide may be determined by disrupting a homologue of this polypeptide in Mice and/or rats and observing the resulting phenotype. Such knock-out experiments are known in the art, some of which are disclosed elsewhere herein.

[0297] Moreover, the biological function of this polypeptide may be determined by the application of antisense and/or sense methodology and the resulting generation of transgenic mice and/or rats. Expressing a particular gene in either sense or antisense orientation in a transgenic mouse or rat could lead to respectively higher or lower expression levels of that particular gene. Altering the endogenous expression levels of a gene can lead to the observation of a particular phenotype that can then be used to derive indications on the function of the gene. The gene can be either over-expressed or under expressed in every cell of the organism at all times using a strong ubiquitous promoter, or it could be expressed in one or more discrete parts of the organism using a well characterized tissue-specific promoter (e.g., testis, heart, pituitary gland, lymph node, kidney, spleen, pancreas, small intestine, thymus, lung, spinal cord, bone marrow, brain, and/or prostate-tissue specific promoter), or it can be expressed at a specified time of development using an inducible and/or a developmentally regulated promoter.

[0298] In the case of HGPRBMY30_{—}3 transgenic mice or rats, if no phenotype is apparent in normal growth conditions, observing the organism under diseased conditions (reproductive, cardiovascular, endocrine, immune, renal, gastrointestinal, pulmonary, and/or neural disorders, in addition to cancers, etc.) may lead to understanding the function of the gene. Therefore, the application of antisense and/or sense methodology to the creation of transgenic mice or rats to refine the biological function of the polypeptide is encompassed by the present invention.

[0299] In preferred embodiments, the following N-terminal HGPRBMY30_{—}3 deletion polypeptides are encompassed by the present invention: M1-E894, L2-E894, G3-E894, P4-E894, A5-E894, V6-E894, L7-E894, G8-E894, L9-E894, S10-E894, L11-E894, W12-E894, A13-E894, L14-E894, L15-E894, H16-E894, P17-E894, G18-E894, T19-E894, G20-E894, A21-E894, P22-E894, L23-E894, C24-E894, L25-E894, S26-E894, Q27-E894, Q28-E894, L29-E894, R30-E894, M31-E894, K32-E894, G33-E894, D34-E894, Y35-E894, V36-E894, L37-E894, G38-E894, G39-E894, L40-E894, F41-E894, P42-E894, L43-E894, G44-E894, E45-E894, A46-E894, E47-E894, E48-E894, A49-E894, G50-E894, L51-E894, R52-E894, S53-E894, R54-E894, T55-E894, R56-E894, P57-E894, S58-E894, S59-E894, P60-E894, V61-E894, C62-E894, T63-E894, R64-E894, F65-E894, S66-E894, S67-E894, N68-E894, G69-E894, L70-E894, L71-E894, W72-E894, A73-E894, L74-E894, A75-E894, M76-E894, K77-E894, M78-E894, A79-E894, V80-E894, E81-E894, E82-E894, I83-E894, N84-E894, N85-E894, K86-E894, S87-E894, D88-E894, L89-E894, L90-E894, P91-E894, G92-E894, L93-E894, R94-E894, L95-E894, G96-E894, Y97-E894, D98-E894, L99-E894, F100-E894, D101-E894, T102-E894, C103-E894, S104-E894, E105-E894, P106-E894, V107-E894, V108-E894, A109-E894, M110-E894, K111-E894, P112-E894, S113-E894, L114-E894, M115-E894, F116-E894, L117-E894, A118-E894, K119-E894, A120-E894, G121-E894, S122-E894, R123-E894, D124-E894, I125-E894, A126-E894, A127-E894, Y128-E894, C129-E894, N130-E894, Y131-E894, T132-E894, Q133-E894, Y134-E894, Q135-E894, P136-E894, R137-E894, V138-E894, L139-E894, A140-E894, V141-E894, I142-E894, G143-E894, P144-E894, H145-E894, S146-E894, S147-E894, E148-E894, L149-E894, A150-E894, M151-E894, V152-E894, T153-E894, G154-E894, K155-E894, F156-E894, F157-E894, S158-E894, F159-E894, F160-E894, L161-E894, M162-E894, P163-E894, Q164-E894, V165-E894, S166-E894, Y167-E894, G168-E894, A169-E894, S170-E894, M171-E894, E172-E894, L173-E894, L174-E894, S175-E894, A176-E894, R177-E894, E178-E894, T179-E894, F180-E894, P181-E894, S182-E894, F183-E894, F184-E894, R185-E894, T186-E894, V187-E894, P188-E894, S189-E894, D190-E894, R191-E894, V192-E894, Q193-E894, L194-E894, T195-E894, A196-E894, A197-E894, A198-E894, E199-E894, L200-E894, L201-E894, Q202-E894, E203-E894, F204-E894, G205-E894, W206-E894, N207-E894, W208-E894, V209-E894, A210-E894, A211-E894, L212-E894, G213-E894, S214-E894, D215-E894, D216-E894, E217-E894, Y218-E894, G219-E894, R220-E894, Q221-E894, G222-E894, L223-E894, S224-E894, I225-E894, F226-E894, S227-E894, A228-E894, L229-E894, A230-E894, A231-E894, A232-E894, R233-E894, G234-E894, I235-E894, C236-E894, I237-E894, A238-E894, H239-E894, E240-E894, G241-E894, L242-E894, V243-E894, P244-E894, L245-E894, P246-E894, R247-E894, A248-E894, D249-E894, D250-E894, S251-E894, R252-E894, L253-E894, G254-E894, K255-E894, V256-E894, Q257-E894, D258-E894, V259-E894, L260-E894, H261-E894, Q262-E894, V263-E894, N264-E894, Q265-E894, S266-E894, S267-E894, V268-E894, Q269-E894, V270-E894, V271-E894, L272-E894, L273-E894, F274-E894, A275-E894, S276-E894, V277-E894, H278-E894, A279-E894, A280-E894, H281-E894, A282-E894, L283-E894, F284-E894, N285-E894, Y286-E894, S287-E894, I288-E894, S289-E894, S290-E894, R291-E894, L292-E894, S293-E894, P294-E894, K295-E894, V296-E894, W297-E894, V298-E894, A299-E894, S300-E894, E301-E894, A302-E894, W303-E894, L304-E894, T305-E894, S306-E894, D307-E894, L308-E894, V309-E894, M310-E894, G311-E894, L312-E894, P313-E894, G314-E894, M315-E894, A316-E894, Q317-E894, M318-E894, G319-E894, T320-E894, V321-E894, L322-E894, G323-E894, F324-E894, L325-E894, Q326-E894, R327-E894, G328-E894, A329-E894, Q330-E894, L331-E894, H332-E894, E333-E894, F334-E894, P335-E894, Q336-E894, Y337-E894, V338-E894, K339-E894, T340-E894, H341-E894, L342-E894, A343-E894, L344-E894, A345-E894, T346-E894, D347-E894, P348-E894, A349-E894, F350-E894, C351-E894, S352-E894, A353-E894, L354-E894, G355-E894, E356-E894, R357-E894, E358-E894, Q359-E894, G360-E894, L361-E894, E362-E894, E363-E894, D364-E894, V365-E894, V366-E894, G367-E894, Q368-E894, R369-E894, C370-E894, P371-E894, Q372-E894, C373-E894, D374-E894, C375-E894, I376-E894, T377-E894, L378-E894, Q379-E894, N380-E894, V381-E894, S382-E894, A383-E894, G384-E894, L385-E894, N386-E894, H387-E894, H388-E894, Q389-E894, T390-E894, F391-E894, S392-E894, V393-E894, Y394-E894, A395-E894, A396-E894, V397-E894, Y398-E894, S399-E894, V400-E894, A401-E894, Q402-E894, A403-E894, L404-E894, H405-E894, N406-E894, T407-E894, L408-E894, Q409-E894, C410-E894, N411-E894, A412-E894, S413-E894, G414-E894, C415-E894, P416-E894, A417-E894, Q418-E894, D419-E894, P420-E894, V421-E894, K422-E894, P423-E894, W424-E894, Q425-E894, L426-E894, L427-E894, E428-E894, N429-E894, M430-E894, Y431-E894, N432-E894, L433-E894, T434-E894, F435-E894, H436-E894, V437-E894, G438-E894, G439-E894, L440-E894, P441-E894, L442-E894, R443-E894, F444-E894, D445-E894, S446-E894, S447-E894, G448-E894, N449-E894, V450-E894, D451-E894, M452-E894, E453-E894, Y454-E894, D455-E894, L456-E894, K457-E894, L458-E894, W459-E894, V460-E894, W461-E894, Q462-E894, G463-E894, S464-E894, V465-E894, P466-E894, R467-E894, L468-E894, H469-E894, D470-E894, V471-E894, G472-E894, R473-E894, F474-E894, N475-E894, G476-E894, S477-E894, L478-E894, R479-E894, T480-E894, E481-E894, R482-E894, L483-E894, K484-E894, I485-E894, R486-E894, W487-E894, H488-E894, T489-E894, S490-E894, D491-E894, N492-E894, Q493-E894, V494-E894, P495-E894, V496-E894, S497-E894, R498-E894, C499-E894, S500-E894, R501-E894, Q502-E894, C503-E894, Q504-E894, E505-E894, G506-E894, Q507-E894, V508-E894, R509-E894, R510-E894, V511-E894, K512-E894, G513-E894, F514-E894, H515-E894, S516-E894, C517-E894, C518-E894, Y519-E894, D520-E894, C521-E894, V522-E894, D523-E894, C524-E894, E525-E894, A526-E894, G527-E894, S528-E894, Y529-E894, R530-E894, Q531-E894, N532-E894, P533-E894, G534-E894, E535-E894, P536-E894, P537-E894, S538-E894, R539-E894, Q540-E894, A541-E894, G542-E894, V543-E894, G544-E894, T545-E894, Q546-E894, Q547-E894, G548-E894, R549-E894, V550-E894, L551-E894, P552-E894, S553-E894, P554-E894, D555-E894, S556-E894, E557-E894, T558-E894, R559-E894, A560-E894, H561-E894, R562-E894, V563-E894, Q564-E894, D565-E894, E566-E894, H567-E894, P568-E894, A569-E894, P570-E894, F571-E894, S572-E894, S573-E894, L574-E894, and/or T575-E894 of SEQ ID NO:6. Polynucleotide sequences encoding these polypeptides are also provided. The present invention also encompasses the use of these N-terminal HGPRBMY30_{—}3 deletion polypeptides as immunogenic and/or antigenic epitopes as described elsewhere herein.

[0300] In preferred embodiments, the following C-terminal HGPRBMY30_{—}3 deletion polypeptides are encompassed by the present invention: M1-E894, M1-H893, M1-K892, M1-G891, M1-Q890, M1-N889, M1-G888, M1-T887, M1-N886, M1-G885, M1-D884, M1-N883, M1-Q882, M1-G881, M1-Q880, M1-A879, M1-D878, M1-G877, M1-P876, M1-G875, M1-G874, M1-G873, M1-L872, M1-F871, M1-F870, M1-E869, M1-P868, M1-T867, M1-N866, M1-L865, M1-G864, M1-P863, M1-Q862, M1-R861, M1-M860, M1-L859, M1-L858, M1-Y857, M1-C856, M1-R855, M1-P854, M1-L853, M1-H852, M1-F851, M1-A850, M1-A849, M1-L848, M1-I847, M1-G846, M1-L845, M1-V844, M1-C843, M1-L842, M1-L841, M1-L840, M1-A839, M1-G838, M1-M837, M1-Q836, M1-V835, M1-A834, M1-P833, M1-R832, M1-L831, M1-V830, M1-V829, M1-Q828, M1-V827, M1-N826, M1-A825, M1-L824, M1-L823, M1-P822, M1-V821, M1-F820, M1-S819, M1-V818, M1-W817, M1-T816, M1-I815, M1-F814, M1-Y813, M1-A812, M1-L811, M1-M810, M1-A809, M1-F808, M1-T807, M1-L806, M1-G805, M1-R804, M1-A803, M1-R802, M1-N801, M1-Y800, M1-R799, M1-G798, M1-P797, M1-Q796, M1-S795, M1-R794, M1-V793, M1-L792, M1-F791, M1-T790, M1-G789, M1-L788, M1-F787, M1-C786, M1-L785, M1-F784, M1-A783, M1-L782, M1-T781, M1-A780, M1-N779, M1-T778, M1-A777, M1-H776, M1-A775, M1-L774, M1-G773, M1-F772, M1-S771, M1-V770, M1-W769, M1-S768, M1-R767, M1-T766, M1-R765, M1-C764, M1-H763, M1-V762, M1-L761, M1-A760, M1-E759, M1-T758, M1-P757, M1-L756, M1-M755, M1-H754, M1-W753, M1-D752, M1-T751, M1-V750, M1-V749, M1-E748, M1-P747, M1-P746, M1-F745, M1-A744, M1-V743, M1-L742, M1-Y741, M1-W740, M1-T739, M1-C738, M1-L737, M1-A736, M1-V735, M1-E734, M1-V733, M1-L732, M1-M731, M1-A730, M1-L729, M1-L728, M1-V727, M1-V726, M1-L725, M1-W724, M1-A723, M1-W722, M1-P721, M1-G720, M1-R719, M1-L718, M1-C717, M1-G716, M1-S715, M1-L714, M1-R713, M1-D712, M1-A711, M1-W710, M1-S709, M1-L708, M1-P707, M1-L706, M1-E705, M1-S704, M1-E703, M1-V702, M1-F701, M1-I700, M1-E699, M1-A698, M1-A697, M1-Q696, M1-L695, M1-F694, M1-L693, M1-T692, M1-S691, M1-L690, M1-C689, M1-G688, M1-T687, M1-L686, M1-P685, M1-L684, M1-H683, M1-S682, M1-L681, M1-P680, M1-Q679, M1-Q678, M1-A677, M1-L676, M1-C675, M1-R674, M1-A673, M1-P672, M1-S671, M1-P670, M1-Q669, M1-G668, M1-P667, M1-F666, M1-L665, M1-L664, M1-V663, M1-S662, M1-L661, M1-C660, M1-V659, M1-L658, M1-G657, M1-L656, M1-C655, M1-V654, M1-L653, M1-G652, M1-F651, M1-C650, M1-A649, M1-L648, M1-P647, M1-G646, M1-G645, M1-S644, M1-A643, M1-Q642, M1-V641, M1-L640, M1-P639, M1-S638, M1-D637, M1-R636, M1-H635, M1-H634, M1-V633, M1-F632, M1-L631, M1-G630, M1-L629, M1-A628, M1-A627, M1-L626, M1-V625, M1-L624, M1-G623, M1-L622, M1-A621, M1-L620, M1-S619, M1-L618, M1-L617, M1-L616, M1-L615, M1-L614, M1-L613, M1-L612, M1-V611, M1-A610, M1-P609, M1-E608, M1-G607, M1-W606, M1-A605, M1-L604, M1-F603, M1-R602, M1-S601, M1-R600, M1-R599, M1-R598, M1-F597, M1-C596, M1-R595, M1-T594, M1-S593, M1-R592, M1-E591, M1-P590, M1-S589, M1-W588, M1-E587, M1-D586, M1-Q585, M1-G584, M1-C583, M1-F582, M1-T581, M1-C580, M1-A579, M1-I578, M1-D577, M1-D576, M1-T575, M1-L574, M1-S573, M1-S572, M1-F571, M1-P570, M1-A569, M1-P568, M1-H567, M1-E566, M1-D565, M1-Q564, M1-V563, M1-R562, M1-H561, M1-A560, M1-R559, M1-T558, M1-E557, M1-S556, M1-D555, M1-P554, M1-S553, M1-P552, M1-L551, M1-V550, M1-R549, M1-G548, M1-Q547, M1-Q546, M1-T545, M1-G544, M1-V543, M1-G542, M1-A541, M1-Q540, M1-R539, M1-S538, M1-P537, M1-P536, M1-E535, M1-G534, M1-P533, M1-N532, M1-Q531, M1-R530, M1-Y529, M1-S528, M1-G527, M1-A526, M1-E525, M1-C524, M1-D523, M1-V522, M1-C521, M1-D520, M1-Y519, M1-C518, M1-C517, M1-S516, M1-H515, M1-F514, M1-G513, M1-K512, M1-V511, M1-R510, M1-R509, M1-V508, M1-Q507, M1-G506, M1-E505, M1-Q504, M1-C503, M1-Q502, M1-R501, M1-S500, M1-C499, M1-R498, M1-S497, M1-V496, M1-P495, M1-V494, M1-Q493, M1-N492, M1-D491, M1-S490, M1-T489, M1-H488, M1-W487, M1-R486, M1-I485, M1-K484, M1-L483, M1-R482, M1-E481, M1-T480, M1-R479, M1-L478, M1-S477, M1-G476, M1-N475, M1-F474, M1-R473, M1-G472, M1-V471, M1-D470, M1-H469, M1-L468, M1-R467, M1-P466, M1-V465, M1-S464, M1-G463, M1-Q462, M1-W461, M1-V460, M1-W459, M1-L458, M1-K457, M1-L456, M1-D455, M1-Y454, M1-E453, M1-M452, M1-D451, M1-V450, M1-N449, M1-G448, M1-S447, M1-S446, M1-D445, M1-F444, M1-R443, M1-L442, M1-P441, M1-L440, M1-G439, M1-G438, M1-V437, M1-H436, M1-F435, M1-T434, M1-L433, M1-N432, M1-Y431, M1-M430, M1-N429, M1-E428, M1-L427, M1-L426, M1-Q425, M1-W424, M1-P423, M1-K422, M1-V421, M1-P420, M1-D419, M1-Q418, M1-A417, M1-P416, M1-C415, M1-G414, M1-S413, M1-A412, M1-N411, M1-C410, M1-Q409, M1-L408, M1-T407, M1-N406, M1-H405, M1-L404, M1-A403, M1-Q402, M1-A401, M1-V400, M1-S399, M1-Y398, M1-V397, M1-A396, M1-A395, M1-Y394, M1-V393, M1-S392, M1-F391, M1-T390, M1-Q389, M1-H388, M1-H387, M1-N386, M1-L385, M1-G384, M1-A383, M1-S382, M1-V381, M1-N380, M1-Q379, M1-L378, M1-T377, M1-I376, M1-C375, M1-D374, M1-C373, M1-Q372, M1-P371, M1-C370, M1-R369, M1-Q368, M1-G367, M1-V366, M1-V365, M1-D364, M1-E363, M1-E362, M1-L361, M1-G360, M1-Q359, M1-E358, M1-R357, M1-E356, M1-G355, M1-L354, M1-A353, M1-S352, M1-C351, M1-F350, M1-A349, M1-P348, M1-D347, M1-T346, M1-A345, M1-L344, M1-A343, M1-L342, M1-H341, M1-T340, M1-K339, M1-V338, M1-Y337, M1-Q336, M1-P335, M1-F334, M1-E333, M1-H332, M1-L331, M1-Q330, M1-A329, M1-G328, M1-R327, M1-Q326, M1-L325, M1-F324, M1-G323, M1-L322, M1-V321, M1-T320, M1-G319, M1-M318, M1-Q317, M1-A316, M1-M315, M1-G314, M1-P313, M1-L312, M1-G311, M1-M310, M1-V309, M1-L308, M1-D307, M1-S306, M1-T305, M1-L304, M1-W303, M1-A302, M1-E301, M1-S300, M1-A299, M1-V298, M1-W297, M1-V296, M1-K295, M1-P294, M1-S293, M1-L292, M1-R291, M1-S290, M1-S289, M1-I288, M1-S287, M1-Y286, M1-N285, M1-F284, M1-L283, M1-A282, M1-H281, M1-A280, M1-A279, M1-H278, M1-V277, M1-S276, M1-A275, M1-F274, M1-L273, M1-L272, M1-V271, M1-V270, M1-Q269, M1-V268, M1-S267, M1-S266, M1-Q265, M1-N264, M1-V263, M1-Q262, M1-H261, M1-L260, M1-V259, M1-D258, M1-Q257, M1-V256, M1-K255, M1-G254, M1-L253, M1-R252, M1-S251, M1-D250, M1-D249, M1-A248, M1-R247, M1-P246, M1-L245, M1-P244, M1-V243, M1-L242, M1-G241, M1-E240, M1-H239, M1-A238, M1-I237, M1-C236, M1-I235, M1-G234, M1-R233, M1-A232, M1-A231, M1-A230, M1-L229, M1-A228, M1-S227, M1-F226, M1-I225, M1-S224, M1-L223, M1-G222, M1-Q221, M1-R220, M1-G219, M1-Y218, M1-E217, M1-D216, M1-D215, M1-S214, M1-G213, M1-L212, M1-A211, M1-A210, M1-V209, M1-W208, M1-N207, M1-W206, M1-G205, M1-F204, M1-E203, M1-Q202, M1-L201, M1-L200, M1-E199, M1-A198, M1-A197, M1-A196, M1-T195, M1-L194, M1-Q193, M1-V192, M1-R191, M1-D190, M1-S189, M1-P188, M1-V187, M1-T186, M1-R185, M1-F184, M1-F183, M1-S182, M1-P181, M1-F180, M1-T179, M1-E178, M1-R177, M1-A176, M1-S175, M1-L174, M1-L173, M1-E172, M1-M171, M1-S170, M1-A169, M1-G168, M1-Y167, M1-S166, M1-V165, M1-Q164, M1-P163, M1-M162, M1-L161, M1-F160, M1-F159, M1-S158, M1-F157, M1-F156, M1-K155, M1-G154, M1-T153, M1-V152, M1-M151, M1-A150, M1-L149, M1-E148, M1-S147, M1-S146, M1-H145, M1-P144, M1-G143, M1-I142, M1-V141, M1-A140, M1-L139, M1-V138, M1-R137, M1-P136, M1-Q135, M1-Y134, M1-Q133, M1-T132, M1-Y131, M1-N130, M1-C129, M1-Y128, M1-A127, M1-A126, M1-I125, M1-D124, M1-R123, M1-S122, M1-G121, M1-A120, M1-K119, M1-A118, M1-L117, M1-F116, M1-M115, M1-L114, M1-S113, M1-P112, M1-K111, M1-M110, M1-A109, M1-V108, M1-V107, M1-P106, M1-E105, M1-S104, M1-C103, M1-T102, M1-D101, M1-F100, M1-L99, M1-D98, M1-Y97, M1-G96, M1-L95, M1-R94, M1-L93, M1-G92, M1-P91, M1-L90, M1-L89, M1-D88, M1-S87, M1-K86, M1-N85, M1-N84, M1-I83, M1-E82, M1-E81, M1-V80, M1-A79, M1-M78, M1-K77, M1-M76, M1-A75, M1-L74, M1-A73, M1-W72, M1-L71, M1-L70, M1-G69, M1-N68, M1-S67, M1-S66, M1-F65, M1-R64, M1-T63, M1-C62, M1-V61, M1-P60, M1-S59, M1-S58, M1-P57, M1-R56, M1-T55, M1-R54, M1-S53, M1-R52, M1-L51, M1-G50, M1-A49, M1-E48, M1-E47, M1-A46, M1-E45, M1-G44, M1-L43, M1-P42, M1-F41, M1-L40, M1-G39, M1-G38, M1-L37, M1-V36, M1-Y35, M1-D34, M1-G33, M1-K32, M1-M31, M1-R30, M1-L29, M1-Q28, M1-Q27, M1-S26, M1-L25, M1-C24, M1-L23, M1-P22, M1-A21, M1-G20, M1-T19, M1-G18, M1-P17, M1-H16, M1-L15, M1-L14, M1-A13, M1-W12, M1-L11, M1-S10, M1-L9, M1-G8, and/or M1-L7 of SEQ ID NO:6. Polynucleotide sequences encoding these polypeptides are also provided. The present invention also encompasses the use of these C-terminal HGPRBMY30_{—}3 deletion polypeptides as immunogenic and/or antigenic epitopes as described elsewhere herein.

[0301] Alternatively, preferred polypeptides of the present invention may comprise polypeptide sequences corresponding to, for example, internal regions of the HGPRBMY30_{—}3 polypeptide (e.g., any combination of both N- and C-terminal HGPRBMY30_{—}3 polypeptide deletions) of SEQ ID NO:6. For example, internal regions could be defined by the equation: amino acid NX to amino acid CX, wherein NX refers to any N-terminal deletion polypeptide amino acid of HGPRBMY30_{—}3 (SEQ ID NO:6), and where CX refers to any C-terminal deletion polypeptide amino acid of HGPRBMY30_{—}3 (SEQ ID NO:6). Polynucleotides encoding these polypeptides are also provided. The present invention also encompasses the use of these polypeptides as an immunogenic and/or antigenic epitope as described elsewhere herein.

[0302] The present invention also encompasses immunogenic and/or antigenic epitopes of the HGPRBMY30_{—}3 polypeptide.

[0303] The HGPRBMY30_{—}3 polypeptides of the present invention were determined to comprise several phosphorylation sites based upon the Motif algorithm (Genetics Computer Group, Inc.). The phosphorylation of such sites may regulate some biological activity of the HGPRBMY30_{—}3 polypeptide. For example, phosphorylation at specific sites may be involved in regulating the proteins ability to associate or bind to other molecules (e.g., proteins, ligands, substrates, DNA, etc.). In the present case, phosphorylation may modulate the ability of the HGPRBMY30_{—}3 polypeptide to associate with other polypeptides, particularly cognate ligand for HGPRBMY30_{—}3, or its ability to modulate certain cellular signal pathways.

[0304] The HGPRBMY30_{—}3 polypeptide was predicted to comprise nine PKC phosphorylation sites using the Motif algorithm (Genetics Computer Group, Inc.). In vivo, protein kinase C exhibits a preference for the phosphorylation of serine or threonine residues. The PKC phosphorylation sites have the following consensus pattern: [ST]-x-[RK], where S or T represents the site of phosphorylation and ‘x’ an intervening amino acid residue. Additional information regarding PKC phosphorylation sites can be found in Woodget J. R., Gould K. L., Hunter T., Eur. J. Biochem. 161:177-184(1986), and Kishimoto A., Nishiyama K., Nakanishi H., Uratsuji Y., Nomura H., Takeyama Y., Nishizuka Y., J. Biol. Chem. 260:12492-12499(1985); which are hereby incorporated by reference herein.

[0305] In preferred embodiments, the following PKC phosphorylation site polypeptides are encompassed by the present invention: ELAMVTGKFFSFF (SEQ ID NO:463), SMELLSARETFPS (SEQ ID NO:181), FRTVPSDRVQLTA (SEQ ID NO:182), FNYSISSRLSPKV (SEQ ID NO:183), ISSRLSPKVWVAS (SEQ ID NO:184), GRFNGSLRTERLK (SEQ ID NO:185), NGSLRTERLKIRW (SEQ ID NO:186), DCEAGSYRQNPGE (SEQ ID NO:187), and/or WSPERSTRCFRRR (SEQ ID NO:188). Polynucleotides encoding these polypeptides are also provided. The present invention also encompasses the use of the HGPRBMY30_{—}3 PKC phosphorylation site polypeptides as immunogenic and/or antigenic epitopes as described elsewhere herein.

[0306] The HGPRBMY30_{—}3 polypeptide was predicted to comprise five casein kinase II phosphorylation sites using the Motif algorithm (Genetics Computer Group, Inc.). Casein kinase II (CK-2) is a protein serine/threonine kinase whose activity is independent of cyclic nucleotides and calcium. CK-2 phosphorylates many different proteins. The substrate specificity [1] of this enzyme can be summarized as follows: (1) Under comparable conditions Ser is favored over Thr.; (2) An acidic residue (either Asp or Glu) must be present three residues from the C-terminal of the phosphate acceptor site; (3) Additional acidic residues in positions +1, +2, +4, and +5 increase the phosphorylation rate. Most physiological substrates have at least one acidic residue in these positions; (4) Asp is preferred to Glu as the provider of acidic determinants; and (5) A basic residue at the N-terminal of the acceptor site decreases the phosphorylation rate, while an acidic one will increase it.

[0307] A consensus pattern for casein kinase II phosphorylations site is as follows: [ST]-x(2)-[DE], wherein ‘x’ represents any amino acid, and S or T is the phosphorylation site.

[0308] Additional information specific to casein kinase II phosphorylation site-II domains may be found in reference to the following publication: Pinna L. A., Biochim. Biophys. Acta 1054:267-284(1990); which is hereby incorporated herein in its entirety.

[0309] In preferred embodiments, the following casein kinase II phosphorylation site polypeptide is encompassed by the present invention: YDLFDTCSEPVVAM (SEQ ID NO:189), SMELLSARETFPSF (SEQ ID NO:190), VAALGSDDEYGRQG (SEQ ID NO:191), PAPFSSLTDDIACT (SEQ ID NO:192), and/or SELPLSWADRLSGC (SEQ ID NO:193). Polynucleotides encoding these polypeptides are also provided. The present invention also encompasses the use of this casein kinase II phosphorylation site polypeptide as an immunogenic and/or antigenic epitope as described elsewhere herein.

[0310] The HGPRBMY30_{—}3 polypeptide was predicted to comprise one cAMP- and cGMP-dependent protein kinase phosphorylation site using the Motif algorithm (Genetics Computer Group, Inc.). There has been a number of studies relative to the specificity of cAMP- and cGMP-dependent protein kinases. Both types of kinases appear to share a preference for the phosphorylation of serine or threonine residues found close to at least two consecutive N-terminal basic residues.

[0311] A consensus pattern for cAMP- and cGMP-dependent protein kinase phosphorylation sites is as follows: [RK](2)-x-[ST], wherein “x” represents any amino acid, and S or T is the phosphorylation site.

[0312] Additional information specific to cAMP- and cGMP-dependent protein kinase phosphorylation sites may be found in reference to the following publication: Fremisco J. R., Glass D. B., Krebs E. G, J. Biol. Chem. 255:4240-4245(1980); Glass D. B., Smith S. B., J. Biol. Chem. 258:14797-14803(1983); and Glass D. B., El-Maghrabi M. R., Pilkis S. J., J. Biol. Chem. 261:2987-2993(1986); which is hereby incorporated herein in its entirety.

[0313] In preferred embodiments, the following cAMP- and cGMP-dependent protein kinase phosphorylation site polypeptide is encompassed by the present invention: STRCFRRRSRFLAW (SEQ ID NO:194). Polynucleotides encoding this polypeptide are also provided. The present invention also encompasses the use of this cAMP- and cGMP-dependent protein kinase phosphorylation site polypeptide as an immunogenic and/or antigenic epitope as described elsewhere herein.

[0314] The HGPRBMY30_{—}3 polypeptide has been shown to comprise nine glycosylation site according to the Motif algorithm (Genetics Computer Group, Inc.). As discussed more specifically herein, protein glycosylation is thought to serve a variety of functions including: augmentation of protein folding, inhibition of protein aggregation, regulation of intracellular trafficking to organelles, increasing resistance to proteolysis, modulation of protein antigenicity, and mediation of intercellular adhesion.

[0315] Asparagine glycosylation sites have the following consensus pattern, N-{P}-[ST]-{P}, wherein N represents the glycosylation site. However, it is well known that that potential N-glycosylation sites are specific to the consensus sequence Asn-Xaa-Ser/Thr. However, the presence of the consensus tripeptide is not sufficient to conclude that an asparagine residue is glycosylated, due to the fact that the folding of the protein plays an important role in the regulation of N-glycosylation. It has been shown that the presence of proline between Asn and Ser/Thr will inhibit N-glycosylation; this has been confirmed by a recent statistical analysis of glycosylation sites, which also shows that about 50% of the sites that have a proline C-terminal to Ser/Thr are not glycosylated. Additional information relating to asparagine glycosylation may be found in reference to the following publications, which are hereby incorporated by reference herein: Marshall R. D., Annu. Rev. Biochem. 41:673-702(1972); Pless D. D., Lennarz W. J., Proc. Natl. Acad. Sci. U.S.A. 74:134-138(1977); Bause E., Biochem. J. 209:331-336(1983); Gavel Y., von Heijne G., Protein Eng. 3:433-442(1990); and Miletich J. P., Broze G. J. Jr., J. Biol. Chem. 265:11397-11404(1990).

[0316] In preferred embodiments, the following asparagine glycosylation site polypeptides are encompassed by the present invention: VEEINNKSDLLPGL (SEQ ID NO:195), IAAYCNYTQYQPRV (SEQ ID NO:196), VLHQVNQSSVQVVL (SEQ ID NO:197), AHALFNYSISSRLS (SEQ ID NO:198), CITLQNVSAGLNHH (SEQ ID NO:199), NTLQCNASGCPAQD (SEQ ID NO:200), LENMYNLTFHVGGL (SEQ ID NO:201), DVGRFNGSLRTERL (SEQ ID NO:202), and/or LAHATNATLAFLCF (SEQ ID NO:203). Polynucleotides encoding these polypeptides are also provided. The present invention also encompasses the use of these HGPRBMY30_{—}3 asparagine glycosylation site polypeptide as immunogenic and/or antigenic epitopes as described elsewhere herein.

[0317] The HGPRBMY30_{—}3 polypeptide was predicted to comprise sixteen N-myristoylation sites using the Motif algorithm (Genetics Computer Group, Inc.). An appreciable number of eukaryotic proteins are acylated by the covalent addition of myristate (a C14-saturated fatty acid) to their N-terminal residue via an amide linkage. The sequence specificity of the enzyme responsible for this modification, myristoyl CoA:protein N-myristoyl transferase (NMT), has been derived from the sequence of known N-myristoylated proteins and from studies using synthetic peptides. The specificity seems to be the following: i.) The N-terminal residue must be glycine; ii.) In position 2, uncharged residues are allowed; iii.) Charged residues, proline and large hydrophobic residues are not allowed; iv.) In positions 3 and 4, most, if not all, residues are allowed; v.) In position 5, small uncharged residues are allowed (Ala, Ser, Thr, Cys, Asn and Gly). Serine is favored; and vi.) In position 6, proline is not allowed.

[0318] A consensus pattern for N-myristoylation is as follows: G-{EDRKHPFYW}-x(2)-[STAGCN]-{P}, wherein ‘x’ represents any amino acid, and G is the N-myristoylation site.

[0319] Additional information specific to N-myristoylation sites may be found in reference to the following publication: Towler D. A., Gordon J. I., Adams S. P., Glaser L., Annu. Rev. Biochem. 57:69-99(1988); and Grand R. J. A., Biochem. J. 258:625-638(1989); which is hereby incorporated herein in its entirety.

[0320] In preferred embodiments, the following N-myristoylation site polypeptides are encompassed by the present invention: LHPGTGAPLCLSQQLR (SEQ ID NO:204), RFSSNGLLWALAMKMA (SEQ ID NO:205), SDLLPGLRLGYDLFDT (SEQ ID NO:206), LAAARGICIAHEGLVP (SEQ ID NO:207), GMAQMGTVLGFLQRGA (SEQ ID NO:208), VGRFNGSLRTERLKIR (SEQ ID NO:209), RQAGVGTQQGRVLPSP (SEQ ID NO:210), LSLALGLVLAALGLFV (SEQ ID NO:211), LVQASGGPLACFGLVC (SEQ ID NO:212), HLPLTGCLSTLFLQAA (SEQ ID NO:213), SWVSFGLAHATNATLA (SEQ ID NO:214), YNRARGLTFAMLAYFI (SEQ ID NO:215), LLCVLGILAAFHLPRC (SEQ ID NO:216), PEFFLGGGPGDAQGQN (SEQ ID NO:217), PGDAQGQNDGNTGNQG (SEQ ID NO:218), and/or QGQNDGNTGNQGKHE (SEQ ID NO:219). Polynucleotides encoding these polypeptides are also provided.

[0321] The present invention also encompasses the use of these N-myristoylation site polypeptides as immunogenic and/or antigenic epitopes as described elsewhere herein.

[0322] The present invention encompasses the identification of compounds and drugs which stimulate HGPRBMY30_{—}3 on the one hand (i.e., agonists) and which inhibit the function of HGPRBMY30_{—}3 on the other hand (i.e., antagonists). In general, such screening procedures involve providing appropriate cells which express the receptor polypeptide of the present invention on the surface thereof. Such cells may include, for example, cells from mammals, yeast, Drosophila or E. coli. In a preferred embodimenta, a polynucleotide encoding the receptor of the present invention may be employed to transfect cells to thereby express the HGPRBMY30_{—}3 polypeptide. The expressed receptor may then be contacted with a test compound to observe binding, stimulation or inhibition of a functional response.

[0323] Many polynucleotide sequences, such as EST sequences, are publicly available and accessible through sequence databases. Some of these sequences are related to SEQ ID NO:5 and may have been publicly available prior to conception of the present invention. Preferably, such related polynucleotides are specifically excluded from the scope of the present invention. To list every related sequence would be cumbersome. Accordingly, preferably excluded from the present invention are one or more polynucleotides consisting of a nucleotide sequence described by the general formula of a-b, where a is any integer between 1 to 2671 of SEQ ID NO:5, b is an integer between 15 to 2685, where both a and b correspond to the positions of nucleotide residues shown in SEQ ID NO:5, and where b is greater than or equal to a+14

[0324] Features of the Polypeptide Encoded by Gene No:4

[0325] The polypeptide of this gene provided as SEQ ID NO:8 (FIGS. 4A-B), encoded by the polynucleotide sequence according to SEQ ID NO:7 (FIGS. 4A-B), and/or encoded by the polynucleotide contained within the deposited clone, HGPRBMY41_{—}1 (also referred to as GPCR-169), has significant homology at the nucleotide and amino acid level to a number of G-protein coupled receptors, which include, for example, other G-protein coupled receptors, specifically, the human TM7XN1 protein precursor protein (O95966; SWISS-PROT Accession No: 095966; SEQ ID NO:40); the human putative G-protein-coupled receptor protein (Q9Y653; SWISS-PROT Accession No: Q9Y653; SEQ ID NO:41); the mouse serpentine receptor protein (Q9QZT2; SWISS-PROT Accession No: Q9QZT2; SEQ ID NO:42); the human DJ287G14.2 G-protein-coupled receptor protein (Q9Y3K0; SWISS-PROT Accession No: Q9Y3K0; SEQ ID NO:43); and the human EGF-like module EMR2 protein (Q9UHX3; SWISS-PROT Accession No: Q9UHX3; SEQ ID NO:44). An alignment of the HGPRBMY41_{—}1, polypeptide with these proteins is provided in FIGS. 18A-C.

[0326] The determined nucleotide sequence of the HGPRBMY41_{—}1, cDNA in FIGS. 4A-B (SEQ ID NO:7) contains an open reading frame encoding a protein of about 400 amino acid residues, with a deduced molecular weight of about 44.1 kDa. The amino acid sequence of the predicted HGPRBMY41_{—}1 polypeptide is shown in FIGS. 4A-B (SEQ ID NO:8). The HGPRBMY41_{—}1 protein shown in FIGS. 4A-B was determined to share significant identity and similarity to several known G-protein coupled receptors, as shown in FIGS. 18A-C. The percent identity and similarity values between the HGPRBMY41_{—}1 polypeptide to these known G-protein coupled receptors is provided in FIG. 24.

[0327] The HGPRBMY41_{—}1 polypeptide was predicted to comprise seven transmembrane domains (TM1 to TM7) located from about amino acid 128 to about amino acid 144 (TM1; SEQ ID NO:71); from about amino acid 159 to about amino acid 178 (TM2; SEQ ID NO:72); from about amino acid 194 to about amino acid 215 (TM3; SEQ ID NO:73); from about amino acid 235 to about amino acid 259 (TM4; SEQ ID NO:74); from about amino acid 288 to about amino acid 306 (TM5; SEQ ID NO:75); from about amino acid 336 to about amino acid 357 (TM6; SEQ ID NO:76); and/or from about amino acid 359 to about amino acid 380 (TM7; SEQ ID NO:77) of SEQ ID NO:8 (FIGS. 4A-B). In this context, the term “about” may be construed to mean 1, 2, 3, 4, 5, 6, 7, 8, 9, or 10 amino acids beyond the N-Terminus and/or C-terminus of the above referenced transmembrane domain polypeptides.

[0328] In preferred embodiments, the following transmembrane domain polypeptides are encompassed by the present invention: GVSMIFLAFTIILYAFL (SEQ ID NO:220, IHVALGGSLFLLNLAFLVNV (SEQ ID NO:221), AVFHYFLLCAFTWMGLEAFHLY (SEQ ID NO:222), LVGWGLPALMVIGTGSANSYGLYTI (SEQ ID NO:223), GYFLITFLFGMVVLALVVW (SEQ ID NO:224), LVGVTWGLAIFTPLGLSTVYIF (SEQ ID NO:225), and/or LFNSLQGVFICCWFTILYLPSQ (SEQ ID NO:226). Polynucleotides encoding these polypeptides are also provided. The present invention also encompasses the use of these HGPRBMY41_{—}1 transmembrane domain polypeptides as immunogenic and/or antigenic epitopes as described elsewhere herein.

[0329] The present invention also encompasses the polypeptide sequences that intervene between each of the predicted HGPRBMY41_{—}1 transmembrane domains. Since these regions are solvent accessible either extracellularly or intracellularly, they are particularly useful for designing antibodies specific to each region. Such antibodies may be useful as antagonists or agonists of the HGPRBMY41_{—}1 full-length polypeptide and may modulate its activity.

[0330] In preferred embodiments, the following inter-transmembrane domain polypeptides are encompassed by the present invention: RLSRERFKSEDAPK (SEQ ID NO:227), GSGSKGSDAACWARG (SEQ ID NO:228), LLAVRVFNTYFGHYFLKLS (SEQ ID NO:229), RDRENRTSLELCWFREGTTMYALYITVH (SEQ ID NO:230), and/or KIFTLSRATAVKERGKNRKKVLTLLGLSS (SEQ ID NO:231).

[0331] In preferred embodiments, the present invention encompasses the use of N-terminal deletions, C-terminal deletions, or any combination of N-terminal and C-terminal deletions of any one or more of the HGPRBMY41_{—}1 TM1 thru TM7 transmembrane domain polypeptides as antigenic and/or immunogenic epitopes.

[0332] In preferred embodiments, the present invention also encompasses the use of N-terminal deletions, C-terminal deletions, or any combination of N-terminal and C-terminal deletions of any one or more of the amino acids intervening (i.e., GPCR extracellular or intracellular loops) the HGPRBMY41_{—}1 TM1 thru TM7 transmembrane domain polypeptides as antigenic and/or immunogenic epitopes.

[0333] The HGPRBMY41_{—}1 polypeptide was also determined to comprise several conserved cysteines which are denoted by dark shading, in addition to other identical residues, as shown in FIGS. 18A-C. Conservation of cysteines at key amino acid residues is indicative of conserved structural features, which may correlate with conservation of protein function and/or activity.

[0334] Expression profiling designed to measure the steady state mRNA levels encoding the HGPRBMY41_{—}1 polypeptide showed predominately high expression levels in bone marrow; significantly in the lung, spleen, and to a lesser extent, in other tissues as shown (See FIG. 23).

[0335] Expanded analysis of HGPRBMY4_{—}1 expression levels by TaqMan™ quantitative PCR (see FIG. 39) confirmed that the HGPRBMY41_{—}1 polypeptide is expressed in immune cells and tissues (FIG. 23). HGPRBMY41_{—}1mRNA was expressed predominately in spleen, mononuclear cells, cerebral blood vessel, the ileum and the trachea. Expression of HGPRBMY41_{—}1 was, in general, extremely low in the brain and was completely absent from the medulla oblongata and parietal cortex.

[0336] Morever, an additional analysis of HGPRBMY41_{—}1 expression levels by TaqMan™ quantitative PCR (see FIG. 40) in disease cells and tissues indicated that the HGPRBMY41_{—}1 polypeptide is differentially expressed in ovarian tumor, stomach tumor, colon tumor, and kidney tumor tissues. In the ovarian tumor tissue results, an average of 2 samples showed about a 45-fold induction in HGPRBMY41_{—}1 steady state RNA over that observed in 1 normal sample. This data supports a role of HGPRBMY41_{—}1 in regulating proliferation in reproductive tissues, particularly in ovarian tissues. HGPRBMY41_{—}1 may represent a potential target for identifying small molecule modulators of HGPRBMY41_{—}1 function and may represent a novel therapeutic option in the treatment of ovarian cancers, or proliferative conditions of the ovary.

[0337] In the stomach tumor tissue results, an average of 3 samples showed about an 8-fold induction in HGPRBMY41_{—}1 steady state RNA over that observed in 1 normal sample. This data supports a role of HGPRBMY41_{—}1 in regulating proliferation in gastrointestinal tissues, particularly in stomach tissue. HGPRBMY41_{—}1 may represent a potential target for identifying small molecule modulators of HGPRBMY41_{—}1 function and may represent a novel therapeutic option in the treatment of stomach cancers, or proliferative conditions of the stomach.

[0338] In the colon tumor tissue results, an average of 2 samples showed about an 48-fold induction in HGPRBMY41_{—}1 steady state RNA over that observed in 1 normal sample. This data supports a role of HGPRBMY41_{—}1 in regulating proliferation in gastrointestinal tissues, particularly in colon tissue. HGPRBMY41_{—}1 may represent a potential target for identifying small molecule modulators of HGPRBMY41_{—}1 function and may represent a novel therapeutic option in the treatment of colon cancers, or proliferative conditions of the colon.

[0339] In the kidney tumor tissue results, an average of 2 samples showed about an 28-fold induction in HGPRBMY41_{—}1 steady state RNA over that observed in 1 normal sample. This data supports a role of HGPRBMY41_{—}1 in regulating proliferation in renal tissues, particularly in kidney tissue. HGPRBMY41_{—}1 may represent a potential target for identifying small molecule modulators of HGPRBMY41_{—}1 function and may represent a novel therapeutic option in the treatment of kidney cancers, or proliferative conditions of the kidney.

[0340] Based upon the strong homology to members of the G-protein coupled receptor proteins, the HGPRBMY41_{—}1 polypeptide is expected to share at least some biological activity with G-protein coupled receptors, specifically serpentine receptors, and/or the human EGF-like module EMR2 protein, and more preferably with G-protein coupled receptors found within bone marrow, lung, and/or spleen, in addition to the G-protein coupled receptors referenced elsewhere herein.

[0341] The HGPRBMY41_{—}1 polynucleotides and polypeptides of the present invention, including agonists and/or fragments thereof, have uses that include detecting, prognosing, treating, preventing, and/or ameliorating the following diseases and/or disorders, neural disorders, metabolic disorders, gastrointestinal disorders, reproductive disorders, Alzheimer's, Parkinson's, diabetes, dwarfism, color blindness, retinal pigmentosa and asthma, depression, schizophrenia, sleeplessness, hypertension, anxiety, stress, renal failure, acute heart failure, hypotension, hypertension, endocrinal diseases, growth disorders, neuropathic pain, obesity, anorexia, HIV infections, cancers, bulimia, asthma, Parkinson's disease, osteoporosis, angina pectoris, myocardial infarction, psychotic, metabolic, cardiovascular and neurological disorders. Also, compounds acting on this receptor can be used as taste modifiers.

[0342] The HGPRBMY41_{—}1 polynucleotides and polypeptides of the present invention, including agonists and/or fragments thereof, have uses that include modulating signal transduction activity, in various cells, tissues, and organisms, and particularly in mammalian bone marrow, lung, and/or spleen; preferably human tissue.

[0343] The strong homology to G-protein coupled receptors, particularly serpentine receptors and EGF-like receptors, combined with the predominate localized expression in bone marrow, spleen tissue, and mononuclear cells suggests the HGPRBMY41_{—}1 polynucleotides and polypeptides may be useful in treating, diagnosing, prognosing, and/or preventing immune diseases and/or disorders. Representative uses are described in the “Immune Activity”, “Chemotaxis”, and “Infectious Disease” sections below, and elsewhere herein. Briefly, the strong expression in immune tissue indicates a role in regulating the proliferation; survival; differentiation; and/or activation of hematopoietic cell lineages, including blood stem cells.

[0344] The HGPRBMY41_{—}1 polypeptide may also be useful as a preventative agent for immunological disorders including arthritis, asthma, immunodeficiency diseases such as AIDS, leukemia, rheumatoid arthritis, granulomatous disease, inflammatory bowel disease, sepsis, acne, neutropenia, neutrophilia, psoriasis, hypersensitivities, such as T-cell mediated cytotoxicity; immune reactions to transplanted organs and tissues, such as host-versus-graft and graft-versus-host diseases, or autoimmunity disorders, such as autoimmune infertility, lense tissue injury, demyelination, systemic lupus erythematosis, drug induced hemolytic anemia, rheumatoid arthritis, Sjogren's disease, and scderoderma. The HGPRBMY41_{—}1 polypeptide may be useful for modulating cytokine production, antigen presentation, or other processes, such as for boosting immune responses, etc.

[0345] Moreover, the protein may represent a factor that influences the differentiation or behavior of other blood cells, or that recruits hematopoietic cells to sites of injury. Thus, this gene product is thought to be useful in the expansion of stem cells and committed progenitors of various blood lineages, and in the differentiation and/or proliferation of various cell types. Furthermore, the protein may also be used to determine biological activity, raise antibodies, as tissuemarkers, to isolate cognate ligands or receptors, to identify agents that modulate their interactions, in addition to its use as a nutritional supplement. Protein, as well as, antibodies directed against the protein may show utility as a tumor marker and/or immunotherapy targets for the above listed tissues.

[0346] The strong homology to G-protein coupled receptors, particularly serpentine receptors and EGF-like receptors, combined with the predominate localized expression in bone marrow and spleen tissue suggests the potential utility for HGPRBMY41_{—}1 polynucleotides and polypeptides in treating, diagnosing, prognosing, and/or preventing pulmonary diseases and disorders which include the following, not limiting examples: ARDS, emphysema, cystic fibrosis, interstitial lung disease, chronic obstructive pulmonary disease, bronchitis, lymphangioleiomyomatosis, pneumonitis, eosinophilic pneumonias, granulomatosis, pulmonary infarction, pulmonary fibrosis, pneumoconiosis, alveolar hemorrhage, neoplasms, lung abscesses, empyema, and increased susceptibility to lung infections (e.g., immumocompromised, HIV, etc.), for example.

[0347] Moreover, polynucleotides and polypeptides, including fragments and/or antagonists thereof, have uses which include, directly or indirectly, treating, preventing, diagnosing, and/or prognosing the following, non-limiting, pulmonary infections: pnemonia, bacterial pnemonia, viral pnemonia (for example, as caused by Influenza virus, Respiratory syncytial virus, Parainfluenza virus, Adenovirus, Coxsackievirus, Cytomegalovirus, Herpes simplex virus, Hantavirus, etc.), mycobacteria pnemonia (for example, as caused by Mycobacterium tuberculosis, etc.) mycoplasma pnemonia, fungal pnemonia (for example, as caused by Pneumocystis carinii, Histoplasma capsulatum, Coccidioides immitis, Blastomyces dermatitidis, Candida sp., Cryptococcus neoformans, Aspergillus sp., Zygomycetes, etc.), Legionnaires' Disease, Chlamydia pnemonia, aspiration pnemonia, Nocordia sp. Infections, parasitic pnemonia (for example, as caused by Strongyloides, Toxoplasma gondii, etc.) necrotizing pnemonia, in addition to any other pulmonary disease and/or disorder (e.g., non-pneumonia) implicated by the causative agents listed above or elsewhere herein.

[0348] The HGPRBMY41_{—}1 polynucleotides and polypeptides, including fragments and agonists thereof, may have uses which include, either directly or indirectly, for boosting immune responses.

[0349] The HGPRBMY41_{—}1 polynucleotides and polypeptides, including fragments and/or modulators thereof, may have uses which include identification of modulators of HGPRBMY41_{—}1 function including antibodies (for detection or neutralization), naturally-occurring modulators and small molecule modulators. Antibodies to domains of the HGPRBMY41_{—}1 protein could be used as diagnostic agents of cardiovascular and inflammatory conditions in patients, are useful in monitoring the activation of signal transduction pathways, and can be used as a biomarker for the involvement of G-protein couplded receptors in disease states, and in the evaluation of inhibitors of G-protein coupled receptors in vivo.

[0350] HGPRBMY41_{—}1 polypeptides and polynucleotides have additional uses which include diagnosing diseases related to the over and/or under expression of HGPRBMY41_{—}1 by identifying mutations in the HGPRBMY41_{—}1 gene by using HGPRBMY41_{—}1 sequences as probes or by determining HGPRBMY41_{—}1 protein or mRNA expression levels. HGPRBMY41_{—}1 polypeptides may be useful for screening compounds that affect the activity of the protein. HGPRBMY41_{—}1 peptides can also be used for the generation of specific antibodies and as bait in yeast two hybrid screens to find proteins the specifically interact with HGPRBMY4_{—}1 (described elsewhere herein).

[0351] Although it is believed the encoded polypeptide may share at least some biological activities with human G-protein coupled receptor proteins (particularly G-protein coupled receptors belonging to the serpentine receptor family and/or EGF-like receptor family), a number of methods of determining the exact biological function of this clone are either known in the art or are described elsewhere herein. Briefly, the function of this clone may be determined by applying microarray methodology. Nucleic acids corresponding to the HGPRBMY41_{—}1 polynucleotides, in addition to, other clones of the present invention, may be arrayed on microchips for expression profiling. Depending on which polynucleotide probe is used to hybridize to the slides, a change in expression of a specific gene may provide additional insight into the function of this gene based upon the conditions being studied. For example, an observed increase or decrease in expression levels when the polynucleotide probe used comes from diseased bone marrow tissue, as compared to, normal tissue might indicate a function in modulating bone marrow function, for example. In the case of HGPRBMY41_{—}1, bone marrow, lung, and/or spleen tissue should be used, for example, to extract RNA to prepare the probe.

[0352] In addition, the function of the protein may be assessed by applying quantitative PCR methodology, for example. Real time quantitative PCR would provide the capability of following the expression of the HGPRBMY41_{—}1 gene throughout development, for example. Quantitative PCR methodology requires only a nominal amount of tissue from each developmentally important step is needed to perform such experiments. Therefore, the application of quantitative PCR methodology to refining the biological function of this polypeptide is encompassed by the present invention. In the case of HGPRBMY41_{—}1, a disease correlation related to HGPRBMY41_{—}1 may be made by comparing the mRNA expression level of HGPRBMY41_{—}1 in normal tissue, as compared to diseased tissue (particularly diseased tissue isolated from the following: bone marrow, lung, and/or spleen tissue). Significantly higher or lower levels of HGPRBMY41_{—}1 expression in the diseased tissue may suggest HGPRBMY41_{—}1 plays a role in disease progression, and antagonists against HGPRBMY41_{—}1 polypeptides would be useful therapeutically in treating, preventing, and/or ameliorating the disease. Alternatively, significantly higher or lower levels of HGPRBMY41_{—}1 expression in the diseased tissue may suggest HGPRBMY41_{—}1 plays a defensive role against disease progression, and agonists of HGPRBMY41_{—}1 polypeptides may be useful therapeutically in treating, preventing, and/or ameliorating the disease. Also encompassed by the present invention are quantitative PCR probes corresponding to the polynucleotide sequence provided as SEQ ID NO:7 (FIGS. 4A-B).

[0353] The function of the protein may also be assessed through complementation assays in yeast. For example, in the case of the HGPRBMY41_{—}1, transforming yeast deficient in serpentine or EGF-like receptor activity, for example, and assessing their ability to grow would provide convincing evidence the HGPRBMY41_{—}1 polypeptide has olfactory receptor activity. Additional assay conditions and methods that may be used in assessing the function of the polynucleotides and polypeptides of the present invention are known in the art, some of which are disclosed elsewhere herein.

[0354] Alternatively, the biological function of the encoded polypeptide may be determined by disrupting a homologue of this polypeptide in Mice and/or rats and observing the resulting phenotype. Such knock-out experiments are known in the art, some of which are disclosed elsewhere herein.

[0355] Moreover, the biological function of this polypeptide may be determined by the application of antisense and/or sense methodology and the resulting generation of transgenic mice and/or rats. Expressing a particular gene in either sense or antisense orientation in a transgenic mouse or rat could lead to respectively higher or lower expression levels of that particular gene. Altering the endogenous expression levels of a gene can lead to the observation of a particular phenotype that can then be used to derive indications on the function of the gene. The gene can be either over-expressed or under expressed in every cell of the organism at all times using a strong ubiquitous promoter, or it could be expressed in one or more discrete parts of the organism using a well characterized tissue-specific promoter (e.g., bone marrow, lung, and/or spleen tissue-specific promoter), or it can be expressed at a specified time of development using an inducible and/or a developmentally regulated promoter.

[0356] In the case of HGPRBMY41_{—}1 transgenic mice or rats, if no phenotype is apparent in normal growth conditions, observing the organism under diseased conditions (immune, hematopoietic, pulmonary diseases, in addition to cancers, etc.) may lead to understanding the function of the gene. Therefore, the application of antisense and/or sense methodology to the creation of transgenic mice or rats to refine the biological function of the polypeptide is encompassed by the present invention.

[0357] In preferred embodiments, the following N-terminal HGPRBMY41_{—}1 deletion polypeptides are encompassed by the present invention: M1-E400, A2-E400, P3-E400, S4-E400, A5-E400, A6-E400, W7-E400, P8-E400, P9-E400, R10-E400, S11-E400, P12-E400, L13-E400, S14-E400, Q15-E400, G16-E400, P17-E400, R18-E400, L19-E400, G20-E400, L21-E400, G22-E400, D23-E400, G24-E400, S25-E400, G26-E400, V27-E400, L28-E400, N29-E400, N30-E400, R31-E400, L32-E400, V33-E400, G34-E400, L35-E400, S36-E400, V37-E400, G38-E400, Q39-E400, M40-E400, H41-E400, V42-E400, T43-E400, K44-E400, L45-E400, A46-E400E47-E400, P48-E400, L49-E400, E50-E400, I51-E400, V52-E400, F53-E400, S54-E400, H55-E400, Q56-E400, R57-E400, P58-E400, P59-E400, P60-E400, N61-E400, M62-E400, T63-E400, L64-E400, T65-E400, C66-E400, V67-E400, F68-E400, W69-E400, D70-E400, V71-E400, T72-E400, K73-E400, G74-E400, T75-E400, T76-E400, G77-E400, D78-E400, W79-E400, S80-E400, S81-E400, E82-E400, G83-E400, C84-E400, S85-E400, T86-E400, E87-E400, V88-E400, R89-E400, P90-E400, E91-E400, G92-E400, T93-E400, V94-E400, C95-E400, C96-E400, C97-E400, D98-E400, H99-E400, L100-E400, T101-E400, F102-E400, F103-E400, A104-E400, L105-E400, L106-E400, L107-E400, R108-E400, P109-E400, T110-E400, L111-E400, D112-E400, Q113-E400, S114-E400, T115-E400, V116-E400, Hl17-E400, I118-E400, L119-E400, T120-E400, R121-E400, I122-E400, S 123-E400, Q124-E400, A125-E400, G126-E400, C127-E400, G128-E400, V129-E400, S 130-E400, M131-E400, I132-E400, F133-E400, L134-E400, A135-E400, F136-E400, T137-E400, I138-E400, I139-E400, L140-E400, Y141-E400, A142-E400, F143-E400, L144-E400, R145-E400, L146-E400, S147-E400, R148-E400, E149-E400, R150-E400, F151-E400, K152-E400, S153-E400, E154-E400, D155-E400, A156-E400, P157-E400, K158-E400, I159-E400, H160-E400, V161-E400, A162-E400, L163-E400, G164-E400, G165-E400, S166-E400, L167-E400, F168-E400, L169-E400, L170-E400, N171-E400, L172-E400, A173-E400, F174-E400, L175-E400, V176-E400, N177-E400, V178-E400, G179-E400, S180-E400, G181-E400, S182-E400, K183-E400, G184-E400, S185-E400, D186-E400, A187-E400, A188-E400, C189-E400, W190-E400, A191-E400, R192-E400, G193-E400, A194-E400, V195-E400, F196-E400, H197-E400, Y198-E400, F199-E400, L200-E400, L201-E400, C202-E400, A203-E400, F204-E400, T205-E400, W206-E400, M207-E400, G208-E400, L209-E400, E210-E400, A211-E400, F212-E400, H213-E400, L214-E400, Y215-E400, L216-E400, L217-E400, A218-E400, V219-E400, R220-E400, V221-E400, F222-E400, N223-E400, T224-E400, Y225-E400, F226-E400, G227-E400, H228-E400, Y229-E400, F230-E400, L231-E400, K232-E400, L233-E400, S234-E400, L235-E400, V236-E400, G237-E400, W238-E400, G239-E400, L240-E400, P241--E400, A242-E400, L243-E400, M244-E400, V245-E400, I246-E400, G247-E400, T248-E400, G249-E400, S250-E400, A251-E400, N252-E400, S253-E400, Y254-E400, G255-E400, L256-E400, Y257-E400, T258-E400, I259-E400, R260-E400, D261-E400, R262-E400, E263-E400, N264-E400, R265-E400, T266-E400, S267-E400, L268-E400, E269-E400, L270-E400, C271-E400, W272-E400, F273-E400, R274-E400, E275-E400, G276-E400, T277-E400, T278-E400, M279-E400, Y280-E400, A281-E400, L282-E400, Y283-E400, I284-E400, T285-E400, V286-E400, H287-E400, G288-E400, Y289-E400, F290-E400, L291-E400, I292-E400, T293-E400, F294-E400, L295-E400, F296-E400, G297-E400, M298-E400, V299-E400, V300-E400, L301-E400, A302-E400, L303-E400, V304-E400, V305-E400, W306-E400, K307-E400, I308-E400, F309-E400, T310-E400, L311-E400, S312-E400, R313-E400, A314-E400, T315-E400, A316-E400, V317-E400, K318-E400, E319-E400, R320-E400, G321-E400, K322-E400, N323-E400, R324-E400, K325-E400, K326-E400, V327-E400, L328-E400, T329-E400, L330-E400, L331-E400, G332-E400, L333-E400, S334-E400, S335-E400, L336-E400, V337-E400, G338-E400, V339-E400, T340-E400, W341-E400, G342-E400, L343-E400, A344-E400, I345-E400, F346-E400, T347-E400, P348-E400, L349-E400, G350-E400, L351-E400, S352-E400, T353-E400, V354-E400, Y355-E400, I356-E400, F357-E400, A358-E400, L359-E400, F360-E400, N361-E400, S362-E400, L363-E400, Q364-E400, G365-E400, V366-E400, F367-E400, I368-E400, C369-E400, C370-E400, W371-E400, F372-E400, T373-E400, I374-E400, L375-E400, Y376-E400, L377-E400, P378-E400, S379-E400, Q380-E400, S381-E400, T382-E400, T383-E400, V384-E400, S385-E400, S386-E400, S387-E400, T388-E400, A389-E400, R390-E400, L391-E400, D392-E400, Q393-E400, and/or A394-E400 of SEQ ID NO:8. Polynucleotide sequences encoding these polypeptides are also provided. The present invention also encompasses the use of these N-terminal HGPRBMY41_{—}1 deletion polypeptides as immunogenic and/or antigenic epitopes as described elsewhere herein.

[0358] In preferred embodiments, the following C-terminal HGPRBMY41_{—}1 deletion polypeptides are encompassed by the present invention: M1-E400, M1-Q399, M1-S398, M1-P397, M1-S396, M1-H395, M1-A394, M1-Q393, M1-D392, M1-L391, M1-R390, M1-A389, M1-T388, M1-S387, M1-S386, M1-S385, M1-V384, M1-T383, M1-T382, M1-S381, M1-Q380, M1-S379, M1-P378, M1-L377, M1-Y376, M1-L375, M1-FI374, M1-T373, M1-F372, M1-W371, M1-C370, M1-C369, M1-I368, M1-F367, M1-V366, M1-G365, M1-Q364, M1-L363, M1-S362, M1-N361, M1-F360, M1-L359, M1-A358, M1-F357, M1-I356, M1-Y355, M1-V354, M1-T353, M1-S352, M1-L351, M1-G350, M1-L349, M1-P348, M1-T347, M1-F346, M1-I345, M1-A344, M1-L343, M1-G342, M1-W341, M1-T340, M1-V339, M1-G338, M1-V337, M1-L336, M1-S335, M1-S334, M1-L333, M1-G332, M1-L331, M1-L330, M1-T329, M1-L328, M1-V327, M1-K326, M1-K325, M1-R324, M1-N323, M1-K322, M1-G321, M1-R320, M1-E319, M1-K318, M1-V317, M1-A316, M1-T315, M1-A314, M1-R313, M1-S312, M1-L311, M1-T310, M1-F309, M1-I308, M1-K307, M1-W306, M1-V305, M1-V304, M1-L303, M1-A302, M1-L301, M1-V300, M1-V299, M1-M298, M1-G297, M1-F296, M1-L295, M1-F294, M1-T293, M1-I292, M1-L291, M1-F290, M1-Y289, M1-G288, M1-H287, M1-V286, M1-T285, M1-I284, M1-Y283, M1-L282, M1-A281, M1-Y280, M1-M279, M1-T278, M1-T277, M1-G276, M1-E275, M1-R274, M1-F273, M1-W272, M1-C271, M1-L270, M1-E269, M1-L268, M1-S267, M1-T266, M1-R265, M1-N264, M1-E263, M1-R262, M1-D261, M1-R260, M1-I259, M1-T258, M1-Y257, M1-L256, M1-G255, M1-Y254, M1-S253, M1-N252, M1-A251, M1-S250, M1-G249, M1-T248, M1-G247, M1-I246, M1-V245, M1-M244, M1-L243, M1-A242, M1-P241, M1-L240, M1-G239, M1-W238, M1-G237, M1-V236, M1-L235, M1-S234, M1-L233, M1-K232, M1-L231, M1-F230, M1-Y229, M1-H228, M1-G227, M1-F226, M1-Y225, M1-T224, M1-N223, M1-F222, M1-V221, M1-R220, M1-V219, M1-A218, M1-L217, M1-L216, M1-Y215, M1-L214, M1-H213, M1-F212, M1-A211, M1-E210, M1-L209, M1-G208, M1-M207, M1-W206, M1-T205, M1-F204, M1-A203, M1-C202, M1-L201, M1-L200, M1-F199, M1-Y198, M1-H197, M1-F196, M1-V195, M1-A194, M1-G193, M1-R192, M1-A191, M1-W190, M1-C189, M1-A188, M1-A187, M1-D186, M1-S185, M1-G184, M1-K183, M1-S182, M1-G181, M1-S180, M1-G179, M1-V178, M1-N177, M1-V176, M1-L175, M1-F174, M1-A173, M1-L172, M1-N171, M1-L170, M1-L169, M1-F168, M1-L167, M1-S166, M1-G165, M1-G164, M1-L163, M1-A162, M1-V161, M1-H160, M1-I159, M1-K158, M1-P157, M1-A156, M1-D155, M1-E154, M1-S153, M1-K152, M1-F151, M1-R150, M1-E149, M1-R148, M1-S147, M1-L146, M1-R145, M1-L144, M1-F143, M1-A142, M1-Y141, M1-L140, M1-I139, M1-I138, M1-T137, M1-F136, M1-A135, M1-L134, M1-F133, M1-1I132, M1-M131, M1-S130, M1-V129, M1-G128, M1-C127, M1-G126, M1-A125, M1-Q124, M1-S123, M1-I122, M1-R121, M1-T120, M1-L119, M1-I118, M1-H117, M1-V116, M1T115, M1-S114, M1-Q113, M1-D112, M1-L111, M1-T100, M1-P109, M1-R108, M1-L107, M1-L106, M1-L105, M1-A104, M1-F103, M1-F102, M1-T101, M1-L100, M1-H99, M1-D98, M1-C97, M1-C96, M1-C95, M1-V94, M1-T93, M1-G92, M1-E91, M1-P90, M1-R89, M1-V88, M1-E87, M1-T86, M1-S85, M1-C84, M1-G83, M1-E82, M1-S81, M1-S80, M1-W79, M1-D78, M1-G77, M1-T76, M1-T75, M1-G74, M1-K73, M1-T72, M1-V71, M1-D70, M1-W69, M1-F68, M1-V67, M1-C66, M1-T65, M1-L64, M1-T63, M1-M62, M1-N61, M1-P60, M1-P59, M1-P58, M1-R57, M1-Q56, M1-H55, M1-S54, M1-F53, M1-V52, M1-I51, M1-E50, M1-L49, M1-P48, M1-E47, M1-A46, M1-L45, M1-K44, M1-T43, M1-V42, M1-H41, M1-M40, M1-Q39, M1-G38, M1-V37, M1-S36, M1-L35, M1-G34, M1-V33, M1-L32, M1-R31, M1-N30, M1-N29, M1-L28, M1-V27, M1-G26, M1-S25, M1-G24, M1-D23, M1-G22, M1-L21, M1-G20, M1-L19, M1-R18, M1-P17, M1-G16, M1-Q15, M1-S14, M1-L13, M1-P12, M1-S11, M1-R10, M1-P9, M1-P8, and/or M1-W7 of SEQ ID NO:8. Polynucleotide sequences encoding these polypeptides are also provided. The present invention also encompasses the use of these C-terminal HGPRBMY41_{—}1 deletion polypeptides as immunogenic and/or antigenic epitopes as described elsewhere herein.

[0359] Alternatively, preferred polypeptides of the present invention may comprise polypeptide sequences corresponding to, for example, internal regions of the HGPRBMY41_{—}1 polypeptide (e.g., any combination of both N- and C-terminal HGPRBMY41_{—}1 polypeptide deletions) of SEQ ID NO:8. For example, internal regions could be defined by the equation: amino acid NX to amino acid CX, wherein NX refers to any N-terminal deletion polypeptide amino acid of HGPRBMY41_{—}1 (SEQ ID NO:8), and where CX refers to any C-terminal deletion polypeptide amino acid of HGPRBMY41_{—}1 (SEQ ID NO:8). Polynucleotides encoding these polypeptides are also provided. The present invention also encompasses the use of these polypeptides as an immunogenic and/or antigenic epitope as described elsewhere herein.

[0360] The present invention also encompasses immunogenic and/or antigenic epitopes of the HGPRBMY41_{—}1 polypeptide.

[0361] The HGPRBMY41_{—}1 polypeptides of the present invention were determined to comprise several phosphorylation sites based upon the Motif algorithm (Genetics Computer Group, Inc.). The phosphorylation of such sites may regulate some biological activity of the HGPRBMY41_{—}1 polypeptide. For example, phosphorylation at specific sites may be involved in regulating the proteins ability to associate or bind to other molecules (e.g., proteins, ligands, substrates, DNA, etc.). In the present case, phosphorylation may modulate the ability of the HGPRBMY41_{—}1 polypeptide to associate with other polypeptides, particularly cognate ligand for HGPRBMY41_{—}1, or its ability to modulate certain cellular signal pathways.

[0362] The HGPRBMY41_{—}1 polypeptide was predicted to comprise two PKC phosphorylation sites using the Motif algorithm (Genetics Computer Group, Inc.). In vivo, protein kinase C exhibits a preference for the phosphorylation of serine or threonine residues. The PKC phosphorylation sites have the following consensus pattern: [ST]-x-[RK], where S or T represents the site of phosphorylation and ‘x’ an intervening amino acid residue. Additional information regarding PKC phosphorylation sites can be found in Woodget J. R., Gould K. L., Hunter T., Eur. J. Biochem. 161:177-184(1986), and Kishimoto A., Nishiyama K., Nakanishi H., Uratsuji Y., Nomura H., Takeyama Y., Nishizuka Y., J. Biol. Chem. 260:12492-12499(1985); which are hereby incorporated by reference herein.

[0363] In preferred embodiments, the following PKC phosphorylation site polypeptides are encompassed by the present invention: SYGLYTIRDRENR (SEQ ID NO:232), and/or TVSSSTARLDQAH (SEQ ID NO:233). Polynucleotides encoding these polypeptides are also provided. The present invention also encompasses the use of the HGPRBMY41_{—}1 PKC phosphorylation site polypeptides as immunogenic and/or antigenic epitopes as described elsewhere herein.

[0364] The HGPRBMY41_{—}1 polypeptide was predicted to comprise three casein kinase II phosphorylation sites using the Motif algorithm (Genetics Computer Group, Inc.). Casein kinase II (CK-2) is a protein serine/threonine kinase whose activity is independent of cyclic nucleotides and calcium. CK-2 phosphorylates many different proteins. The substrate specificity [1] of this enzyme can be summarized as follow: (1) Under comparable conditions Ser is favored over Thr.; (2) An acidic residue (either Asp or Glu) must be present three residues from the C-terminal of the phosphate acceptor site; (3) Additional acidic residues in positions +1, +2, +4, and +5 increase the phosphorylation rate. Most physiological substrates have at least one acidic residue in these positions; (4) Asp is preferred to Glu as the provider of acidic determinants; and (5) A basic residue at the N-terminal of the acceptor site decreases the phosphorylation rate, while an acidic one will increase it.

[0365] A consensus pattern for casein kinase II phosphorylations site is as follows: [ST]-x(2)-[DE], wherein ‘x’ represents any amino acid, and S or T is the phosphorylation site.

[0366] Additional information specific to casein kinase II phosphorylation site-II domains may be found in reference to the following publication: Pinna L. A., Biochim. Biophys. Acta 1054:267-284(1990); which is hereby incorporated herein in its entirety.

[0367] In preferred embodiments, the following casein kinase II phosphorylation site polypeptide is encompassed by the present invention: DVTKGTTGDWSSEG (SEQ ID NO:234), SYGLYTIRDRENRT (SEQ ID NO:235), and/or DRENRTSLELCWFR (SEQ ID NO:236). Polynucleotides encoding these polypeptides are also provided. The present invention also encompasses the use of this casein kinase II phosphorylation site polypeptide as an immunogenic and/or antigenic epitope as described elsewhere herein.

[0368] The HGPRBMY41_{—}1 polypeptide has been shown to comprise two glycosylation site according to the Motif algorithm (Genetics Computer Group, Inc.). As discussed more specifically herein, protein glycosylation is thought to serve a variety of functions including: augmentation of protein folding, inhibition of protein aggregation, regulation of intracellular trafficking to organelles, increasing resistance to proteolysis, modulation of protein antigenicity, and mediation of intercellular adhesion.

[0369] Asparagine glycosylation sites have the following consensus pattern, N-{P}-[ST]-{P}, wherein N represents the glycosylation site. However, it is well known that that potential N-glycosylation sites are specific to the consensus sequence Asn-Xaa-Ser/Thr. However, the presence of the consensus tripeptide is not sufficient to conclude that an asparagine residue is glycosylated, due to the fact that the folding of the protein plays an important role in the regulation of N-glycosylation. It has been shown that the presence of proline between Asn and Ser/Thr will inhibit N-glycosylation; this has been confirmed by a recent statistical analysis of glycosylation sites, which also shows that about 50% of the sites that have a proline C-terminal to Ser/Thr are not glycosylated. Additional information relating to asparagine glycosylation may be found in reference to the following publications, which are hereby incorporated by reference herein: Marshall R. D., Annu. Rev. Biochem. 41:673-702(1972); Pless D. D., Lennarz W. J., Proc. Natl. Acad. Sci. U.S.A. 74:134-138(1977); Bause E., Biochem. J. 209:331-336(1983); Gavel Y., von Heijne G., Protein Eng. 3:433-442(1990); and Miletich J. P., Broze G. J. Jr., J. Biol. Chem. 265:11397-11404(1990).

[0370] In preferred embodiments, the following asparagine glycosylation site polypeptides are encompassed by the present invention: QRPPPNMTLTCVFW (SEQ ID NO:237), and/or IRDRENRTSLELCW (SEQ ID NO:238). Polynucleotides encoding these polypeptides are also provided. The present invention also encompasses the use of these HGPRBMY41_{—}1 asparagine glycosylation site polypeptide as immunogenic and/or antigenic epitopes as described elsewhere herein.

[0371] The HGPRBMY41_{—}1 polypeptide was predicted to comprise eleven N-myristoylation sites using the Motif algorithm (Genetics Computer Group, Inc.). An appreciable number of eukaryotic proteins are acylated by the covalent addition of myristate (a C14-saturated fatty acid) to their N-terminal residue via an amide linkage. The sequence specificity of the enzyme responsible for this modification, myristoyl CoA:protein N-myristoyl transferase (NMT), has been derived from the sequence of known N-myristoylated proteins and from studies using synthetic peptides. The specificity seems to be the following: i.) The N-terminal residue must be glycine; ii.) In position 2, uncharged residues are allowed; iii.) Charged residues, proline and large hydrophobic residues are not allowed; iv.) In positions 3 and 4, most, if not all, residues are allowed; v.) In position 5, small uncharged residues are allowed (Ala, Ser, Thr, Cys, Asn and Gly). Serine is favored; and vi.) In position 6, proline is not allowed.

[0372] A consensus pattern for N-myristoylation is as follows: G-{EDRKHPFYW}-x(2)-[STAGCN]-{P}, wherein ‘x’ represents any amino acid, and G is the N-myristoylation site.

[0373] Additional information specific to N-myristoylation sites may be found in reference to the following publication: Towler D. A., Gordon J. I., Adams S. P., Glaser L., Annu. Rev. Biochem. 57:69-99(1988); and Grand R. J. A., Biochem. J. 258:625-638(1989); which is hereby incorporated herein in its entirety.

[0374] In preferred embodiments, the following N-myristoylation site polypeptides are encompassed by the present invention: QGPRLGLGDGSGVLNN (SEQ ID NO:239), LGDGSGVLNNRLVGLS (SEQ ID NO:240), NNRLVGLSVGQMHVTK (SEQ ID NO:241), EVRPEGTVCCCDHLTF (SEQ ID NO:242), RISQAGCGVSMIFLAF (SEQ ID NO:243), VNVGSGSKGSDAACWA (SEQ ID NO:244), GSGSKGSDAACWARGA (SEQ ID NO:245), ALMVIGTGSANSYGLY (SEQ ID NO:246), MVIGTGSANSYGLYTI (SEQ ID NO:247), LSSLVGVTWGLAIFTP (SEQ ID NO:248), and/or FNSLQGVFICCWFTIL (SEQ ID NO:249). Polynucleotides encoding these polypeptides are also provided. The present invention also encompasses the use of these N-myristoylation site polypeptides as immunogenic and/or antigenic epitopes as described elsewhere herein.

[0375] Many polynucleotide sequences, such as EST sequences, are publicly available and accessible through sequence databases. Some of these sequences are related to SEQ ID NO:7and may have been publicly available prior to conception of the present invention. Preferably, such related polynucleotides are specifically excluded from the scope of the present invention. To list every related sequence would be cumbersome. Accordingly, preferably excluded from the present invention are one or more polynucleotides consisting of a nucleotide sequence described by the general formula of a-b, where a is any integer between 1 to 1189 of SEQ ID NO:7, b is an integer between 15 to 1203, where both a and b correspond to the positions of nucleotide residues shown in SEQ ID NO:7, and where b is greater than or equal to a+14.

[0376] Features of the Polypeptide Encoded by Gene No:5

[0377] The polypeptide of this gene provided as SEQ ID NO:10 (FIGS. 5A-B), encoded by the polynucleotide sequence according to SEQ ID NO:9 (FIGS. 5A-B), and/or encoded by the polynucleotide contained within the deposited clone, HGPRBMY41_{—}2 (also referred to as GPCR-169 splice variant 2), has significant homology at the nucleotide and amino acid level to a number of G-protein coupled receptors, which include, for example, other G-protein coupled receptors, specifically, the human TM7XN1 protein precursor protein (O95966; SWISS-PROT Accession No: O95966; SEQ ID NO:40); the human putative G-protein-coupled receptor protein (Q9Y653; SWISS-PROT Accession No: Q9Y653; SEQ ID NO:41); the mouse serpentine receptor protein (Q9QZT2; SWISS-PROT Accession No: Q9QZT2; SEQ ID NO:42); the human DJ287G14.2 G-protein-coupled receptor protein (Q9Y3K0; SWISS-PROT Accession No: Q9Y3K0; SEQ ID NO:43); and the human EGF-like module EMR2 protein (Q9UHX3; SWISS-PROT Accession No: Q9UHX3; SEQ ID NO:44). An alignment of the HGPRBMY41_{—}2, polypeptide with these proteins is provided in FIGS. 18A-C.

[0378] The determined nucleotide sequence of the HGPRBMY41_{—}2, cDNA in FIGS. 5A-B (SEQ ID NO:9) contains an open reading frame encoding a protein of about 549 amino acid residues, with a deduced molecular weight of about 60.9 kDa. The amino acid sequence of the predicted HGPRBMY41_{—}2 polypeptide is shown in FIGS. 5A-B (SEQ ID NO:10). The HGPRBMY41_{—}2 protein shown in FIGS. 5A-B was determined to share significant identity and similarity to several known G-protein coupled receptors, as shown in FIGS. 18A-C. The percent identity and similarity values between the HGPRBMY41_{—}2 polypeptide to these known G-protein coupled receptors is provided in FIG. 24.

[0379] The HGPRBMY41_{—}2 polynucleotide (SEQ ID NO:9) and polypeptide (SEQ ID NO:10) represents a novel splice variant form of the HGPBMY41_{—}1 polynucleotide (SEQ ID NO:7) and polypeptide (SEQ ID NO:8) of the present invention.

[0380] The HGPRBMY41_{—}2 polypeptide was predicted to comprise seven transmembrane domains (TM1 to TM7) located from about amino acid 277 to about amino acid 293 (TM1; SEQ ID NO:250); from about amino acid 308 to about amino acid 327 (TM2; SEQ ID NO:251); from about amino acid 343 to about amino acid 364 (TM3; SEQ ID NO:252); from about amino acid 384 to about amino acid 408 (TM4; SEQ ID NO:253); from about amino acid 437 to about amino acid 455 (TM5; SEQ ID NO:254); from about amino acid 485 to about amino acid 506 (TM6; SEQ ID NO:255); and/or from about amino acid 508 to about amino acid 529 (TM7; SEQ ID NO:256) of SEQ ID NO:10 (FIGS. 5A-B). In this context, the term “about” may be construed to mean 1, 2, 3, 4, 5, 6, 7, 8, 9, or 10 amino acids beyond the N-Terminus and/or C-terminus of the above referenced transmembrane domain polypeptides.

[0381] In preferred embodiments, the following transmembrane domain polypeptides are encompassed by the present invention: GVSMIFLAFTIILYAFL (SEQ ID NO:250), IHVALGGSLFLLNLAFLVNV (SEQ ID NO:251), AVFHYFLLCAFTWMGLEAFHLY (SEQ ID NO:252), LVGWGLPALMVIGTGSANSYGLYTI (SEQ ID NO:253), GYFLITFLFGMVVLALVVW (SEQ ID NO:254), LVGVTWGLAIFTPLGLSTVYIF (SEQ ID NO:255), and/or LFNSLQGVFICCWFTILYLPSQ (SEQ ID NO:256). Polynucleotides encoding these polypeptides are also provided. The present invention also encompasses the use of these HGPRBMY41_{—}2 transmembrane domain polypeptides as immunogenic and/or antigenic epitopes as described elsewhere herein.

[0382] The present invention also encompasses the polypeptide sequences that intervene between each of the predicted HGPRBMY41_{—}2 transmembrane domains. Since these regions are solvent accessible either extracellularly or intracellularly, they are particularly useful for designing antibodies specific to each region. Such antibodies may be useful as antagonists or agonists of the HGPRBMY41_{—}2 full-length polypeptide and may modulate its activity.

[0383] In preferred embodiments, the following inter-transmembrane domain polypeptides are encompassed by the present invention: RLSRERFKSEDAPK (SEQ ID NO:257), GSGSKGSDAACWARG (SEQ ID NO:258), LLAVRVFNTYFGHYFLKLS (SEQ ID NO:259), RDRENRTSLELCWFREGTTMYALYITVH (SEQ ID NO:260), and/or KIFTLSRATAVKERGKNRKKVLTLLGLSS (SEQ ID NO:261).

[0384] In preferred embodiments, the present invention encompasses the use of N-terminal deletions, C-terminal deletions, or any combination of N-terminal and C-terminal deletions of any one or more of the HGPRBMY41_{—}2 TM1 thru TM7 transmembrane domain polypeptides as antigenic and/or immunogenic epitopes.

[0385] In preferred embodiments, the present invention also encompasses the use of N-terminal deletions, C-terminal deletions, or any combination of N-terminal and C-terminal deletions of any one or more of the amino acids intervening (i.e., GPCR extracellular or intracellular loops) the HGPRBMY41_{—}2 TM1 thru TM7 transmembrane domain polypeptides as antigenic and/or immunogenic epitopes.

[0386] The HGPRBMY41_{—}2 polypeptide was also determined to comprise several conserved cysteines which are denoted by dark shading, in addition to other identical residues, as shown in FIGS. 18A-C. Conservation of cysteines at key amino acid residues is indicative of conserved structural features, which may correlate with conservation of protein function and/or activity.

[0387] Expression profiling designed to measure the steady state mRNA levels encoding the HGPRBMY41_{—}1 polypeptide showed predominately high expression levels in bone marrow; significantly in the lung, spleen, and to a lesser extent, in other tissues as shown (See FIG. 23). The expression profile of the HGPRBMY41_{—}2 splice variant is expected to be the same or similar to the HGPRBMY41_{—}1 polypeptide.

[0388] Moreover, HGPRBMY41_{—}2 is also expected to share the same or similar level of differential expression in ovarian, stomach, colon, and kidney tumors as observed for HGPRBMY41_{—}1 (see FIG. 40). Likewise, HGPRBMY41_{—}2 may represent a potential target for identifying small molecule modulators of HGPRBMY41_{—}2 function and may represent a novel therapeutic option in the treatment of ovarian, stomach, colon, and kidney cancers, or proliferative conditions of the ovarian, stomach, colon, and kidney.

[0389] Based upon the strong homology to members of the G-protein coupled receptor proteins, the HGPRBMY41_{—}2 polypeptide is expected to share at least some biological activity with G-protein coupled receptors, specifically serpentine receptors, and/or the human EGF-like module EMR2 protein, and more preferably with G-protein coupled receptors found within bone marrow, lung, and/or spleen, in addition to the G-protein coupled receptors referenced elsewhere herein.

[0390] The HGPRBMY41_{—}2 polynucleotides and polypeptides of the present invention, including agonists and/or fragments thereof, have uses that include detecting, prognosing, treating, preventing, and/or ameliorating the following diseases and/or disorders, neural disorders, metabolic disorders, gastrointestinal disorders, reproductive disorders, Alzheimer's, Parkinson's, diabetes, dwarfism, color blindness, retinal pigmentosa and asthma, depression, schizophrenia, sleeplessness, hypertension, anxiety, stress, renal failure, acute heart failure, hypotension, hypertension, endocrinal diseases, growth disorders, neuropathic pain, obesity, anorexia, HIV infections, cancers, bulimia, asthma, Parkinson's disease, osteoporosis, angina pectoris, myocardial infarction, psychotic, metabolic, cardiovascular and neurological disorders. Also, compounds acting on this receptor can be used as taste modifiers.

[0391] The HGPRBMY41_{—}2 polynucleotides and polypeptides of the present invention, including agonists and/or fragments thereof, have uses that include modulating signal transduction activity, in various cells, tissues, and organisms, and particularly in mammalian bone marrow, lung, and/or spleen; preferably human tissue.

[0392] The strong homology to G-protein coupled receptors, particularly serpentine receptors and EGF-like receptors, combined with the predominate localized expression of HGPRBMY41_{—}1 in bone marrow and spleen tissue suggests the HGPRBMY41_{—}2 polynucleotides and polypeptides may be useful in treating, diagnosing, prognosing, and/or preventing immune diseases and/or disorders. Representative uses are described in the “Immune Activity”, “Chemotaxis”, and “Infectious Disease” sections below, and elsewhere herein. Briefly, the strong expression in immune tissue indicates a role in regulating the proliferation; survival; differentiation; and/or activation of hematopoietic cell lineages, including blood stem cells.

[0393] The HGPRBMY41_{—}2 polypeptide may also be useful as a preventative agent for immunological disorders including arthritis, asthma, immunodeficiency diseases such as AIDS, leukemia, rheumatoid arthritis, granulomatous disease, inflammatory bowel disease, sepsis, acne, neutropenia, neutrophilia, psoriasis, hypersensitivities, such as T-cell mediated cytotoxicity; immune reactions to transplanted organs and tissues, such as host-versus-graft and graft-versus-host diseases, or autoimmunity disorders, such as autoimmune infertility, lense tissue injury, demyelination, systemic lupus erythematosis, drug induced hemolytic anemia, rheumatoid arthritis, Sjogren's disease, and scleroderma. The HGPRBMY41_{—}2 polypeptide may be useful for modulating cytokine production, antigen presentation, or other processes, such as for boosting immune responses, etc.

[0394] Moreover, the protein may represent a factor that influences the differentiation or behavior of other blood cells, or that recruits hematopoietic cells to sites of injury. Thus, this gene product is thought to be useful in the expansion of stem cells and committed progenitors of various blood lineages, and in the differentiation and/or proliferation of various cell types. Furthermore, the protein may also be used to determine biological activity, raise antibodies, as tissuemarkers, to isolate cognate ligands or receptors, to identify agents that modulate their interactions, in addition to its use as a nutritional supplement. Protein, as well as, antibodies directed against the protein may show utility as a tumor marker and/or immunotherapy targets for the above listed tissues.

[0395] The strong homology to G-protein coupled receptors, particularly serpentine receptors and EGF-like receptors, combined with the predominate localized expression of HGPRBMY41_{—}1 in bone marrow and spleen tissue suggests the potential utility for HGPRBMY41_{—}2 polynucleotides and polypeptides in treating, diagnosing, prognosing, and/or preventing pulmonary diseases and disorders which include the following, not limiting examples: ARDS, emphysema, cystic fibrosis, interstitial lung disease, chronic obstructive pulmonary disease, bronchitis, lymphangioleiomyomatosis, pneumonitis, eosinophilic pneumonias, granulomatosis, pulmonary infarction, pulmonary fibrosis, pneumoconiosis, alveolar hemorrhage, neoplasms, lung abscesses, empyema, and increased susceptibility to lung infections (e.g., immumocompromised, HIV, etc.), for example.

[0396] Moreover, polynucleotides and polypeptides, including fragments and/or antagonists thereof, have uses which include, directly or indirectly, treating, preventing, diagnosing, and/or prognosing the following, non-limiting, pulmonary infections: pnemonia, bacterial pnemonia, viral pnemonia (for example, as caused by Influenza virus, Respiratory syncytial virus, Parainfluenza virus, Adenovirus, Coxsackievirus, Cytomegalovirus, Herpes simplex virus, Hantavirus, etc.), mycobacteria pnemonia (for example, as caused by Mycobacterium tuberculosis, etc.) mycoplasma pnemonia, fungal pnemonia (for example, as caused by Pneumocystis carinii, Histoplasma capsulatum, Coccidioides immitis, Blastomyces dermatitidis, Candida sp., Cryptococcus neoformans, Aspergillus sp., Zygomycetes, etc.), Legionnaires' Disease, Chlamydia pnemonia, aspiration pnemonia, Nocordia sp. Infections, parasitic pnemonia (for example, as caused by Strongyloides, Toxoplasma gondii, etc.) necrotizing pnemonia, in addition to any other pulmonary disease and/or disorder (e.g., non-pneumonia) implicated by the causative agents listed above or elsewhere herein.

[0397] The HGPRBMY41_{—}2 polynucleotides and polypeptides, including fragments and agonists thereof, may have uses which include, either directly or indirectly, for boosting immune responses.

[0398] The HGPRBMY41_{—}2 polynucleotides and polypeptides, including fragments and/or modulators thereof, may have uses which include identification of modulators of HGPRBMY41_{—}2 function including antibodies (for detection or neutralization), naturally-occurring modulators and small molecule modulators. Antibodies to domains of the HGPRBMY41_{—}2 protein could be used as diagnostic agents of cardiovascular and inflammatory conditions in patients, are useful in monitoring the activation of signal transduction pathways, and can be used as a biomarker for the involvement of G-protein couplded receptors in disease states, and in the evaluation of inhibitors of G-protein coupled receptors in vivo.

[0399] HGPRBMY41_{—}2 polypeptides and polynucleotides have additional uses which include diagnosing diseases related to the over and/or under expression of HGPRBMY41_{—}2 by identifying mutations in the HGPRBMY41_{—}2 gene by using HGPRBMY41_{—}2 sequences as probes or by determining HGPRBMY41_{—}2 protein or mRNA expression levels. HGPRBMY41_{—}2 polypeptides may be useful for screening compounds that affect the activity of the protein. HGPRBMY41_{—}2 peptides can also be used for the generation of specific antibodies and as bait in yeast two hybrid screens to find proteins the specifically interact with HGPRBMY41_{—}2 (described elsewhere herein).

[0400] Although it is believed the encoded polypeptide may share at least some biological activities with human G-protein coupled receptor proteins (particularly G-protein coupled receptors belonging to the serpentine receptor family and/or EGF-like receptor family), a number of methods of determining the exact biological function of this clone are either known in the art or are described elsewhere herein. Briefly, the function of this clone may be determined by applying microarray methodology. Nucleic acids corresponding to the HGPRBMY41_{—}2 polynucleotides, in addition to, other clones of the present invention, may be arrayed on microchips for expression profiling. Depending on which polynucleotide probe is used to hybridize to the slides, a change in expression of a specific gene may provide additional insight into the function of this gene based upon the conditions being studied. For example, an observed increase or decrease in expression levels when the polynucleotide probe used comes from diseased bone marrow tissue, as compared to, normal tissue might indicate a function in modulating bone marrow function, for example. In the case of HGPRBMY41_{—}2, bone marrow, lung, and/or spleen tissue should be used, for example, to extract RNA to prepare the probe.

[0401] In addition, the function of the protein may be assessed by applying quantitative PCR methodology, for example. Real time quantitative PCR would provide the capability of following the expression of the HGPRBMY41_{—}2 gene throughout development, for example. Quantitative PCR methodology requires only a nominal amount of tissue from each developmentally important step is needed to perform such experiments. Therefore, the application of quantitative PCR methodology to refining the biological function of this polypeptide is encompassed by the present invention. In the case of HGPRBMY41_{—}2, a disease correlation related to HGPRBMY41_{—}2 may be made by comparing the mRNA expression level of HGPRBMY41_{—}2 in normal tissue, as compared to diseased tissue (particularly diseased tissue isolated from the following: bone marrow, lung, and/or spleen tissue). Significantly higher or lower levels of HGPRBMY41_{—}2 expression in the diseased tissue may suggest HGPRBMY41_{—}2 plays a role in disease progression, and antagonists against HGPRBMY41_{—}2 polypeptides would be useful therapeutically in treating, preventing, and/or ameliorating the disease. Alternatively, significantly higher or lower levels of HGPRBMY41_{—}2 expression in the diseased tissue may suggest HGPRBMY41_{—}2 plays a defensive role against disease progression, and agonists of HGPRBMY41_{—}2 polypeptides may be useful therapeutically in treating, preventing, and/or ameliorating the disease. Also encompassed by the present invention are quantitative PCR probes corresponding to the polynucleotide sequence provided as SEQ ID NO:9 (FIGS. 5A-B).

[0402] The function of the protein may also be assessed through complementation assays in yeast. For example, in the case of the HGPRBMY41_{—}2, transforming yeast deficient in serpentine or EGF-like receptor activity, for example, and assessing their ability to grow would provide convincing evidence the HGPRBMY41_{—}2 polypeptide has olfactory receptor activity. Additional assay conditions and methods that may be used in assessing the function of the polynucleotides and polypeptides of the present invention are known in the art, some of which are disclosed elsewhere herein.

[0403] Alternatively, the biological function of the encoded polypeptide may be determined by disrupting a homologue of this polypeptide in Mice and/or rats and observing the resulting phenotype. Such knock-out experiments are known in the art, some of which are disclosed elsewhere herein.

[0404] Moreover, the biological function of this polypeptide may be determined by the application of antisense and/or sense methodology and the resulting generation of transgenic mice and/or rats. Expressing a particular gene in either sense or antisense orientation in a transgenic mouse or rat could lead to respectively higher or lower expression levels of that particular gene. Altering the endogenous expression levels of a gene can lead to the observation of a particular phenotype that can then be used to derive indications on the function of the gene. The gene can be either over-expressed or under expressed in every cell of the organism at all times using a strong ubiquitous promoter, or it could be expressed in one or more discrete parts of the organism using a well characterized tissue-specific promoter (e.g., bone marrow, lung, and/or spleen tissue-specific promoter), or it can be expressed at a specified time of development using an inducible and/or a developmentally regulated promoter.

[0405] In the case of HGPRBMY41_{—}2 transgenic mice or rats, if no phenotype is apparent in normal growth conditions, observing the organism under diseased conditions (immune, hematopoietic, pulmonary diseases, in addition to cancers, etc.) may lead to understanding the function of the gene. Therefore, the application of antisense and/or sense methodology to the creation of transgenic mice or rats to refine the biological function of the polypeptide is encompassed by the present invention.

[0406] In preferred embodiments, the following N-terminal HGPRBMY41_{—}2 deletion polypeptides are encompassed by the present invention: M1-E549, A2-E549, T3-E549, P4-E549, R5-E549, G6-E549, L7-E549, G8-E549, A9-E549, L10-E549, L11-E549, L12-E549, L13-E549, L14-E549, L15-E549, L16-E549, P17-E549, T18-E549, S19-E549, G20-E549, Q21-E549, E22-E549, K23-E549, P24-E549, T25-E549, E26-E549, G27-E549, P28-E549, R29-E549, N30-E549, T31-E549, C32-E549, L33-E549, G34-E549, S35-E549, N36-E549, N37-E549, M38-E549, Y39-E549, D40-E549, I41-E549, F42-E549, N43-E549, L44-E549, N45-E549, D46-E549, K47-E549, A48-E549, L49-E549, C50-E549, F51-E549, T52-E549, K53-E549, C54-E549, R55-E549, Q56-E549, S57-E549, G58-E549, S59-E549, D60-E549, S61-E549, C62-E549, N63-E549, V64-E549, E65-E549, N66-E549, L67-E549, Q68-E549, R69-E549, Y70-E549, W71-E549, L72-E549, N73-E549, Y74-E549, E75-E549, A76-E549, H77-E549, L78-E549, M79-E549, K80-E549, E81-E549, G82-E549, L83-E549, T84-E549, Q85-E549, K86-E549, V87-E549, N88-E549, T89-E549, P90-E549, F91-E549, L92-E549, K93-E549, A94-E549, L95-E549, V96-E549, Q97-E549, N98-E549, L99-E549, S100-E549, T101-E549, N102-E549, T103-E549, A104-E549, E105-E549, D106-E549, F107-E549, Y108-E549, F109-E549, S110-E549, L111-E549, E112-E549, P113-E549, S114-E549, Q115-E549, V116-E549, P117-E549, R118-E549, Q119-E549, V120-E549, M121-E549, K122-E549, D123-E549, E124-E549, D125-E549, K126-E549, P127-E549, P128-E549, D129-E549, R130-E549, V131-E549, R132-E549, L133-E549, P134-E549, K135-E549, S136-E549, L137-E549, F138-E549, R139-E549, S140-E549, L141-E549, P142-E549, G143-E549, N144-E549,

[0407] R145-E549, S146-E549, V147-E549, V148-E549, R149-E549, L150-E549, A151-E549, V152-E549, T153-E549, I154-E549, L155-E549, D156-E549, I157-E549, G158-E549, P159-E549, G160-E549, T161-E549, L162-E549, F163-E549, K164-E549, G165-E549, P166-E549, R167-E549, L168-E549, G169-E549, L170-E549, G171-E549, D172-E549, G173-E549, S174-E549, G175-E549, V176-E549, L177-E549, N178-E549, N179-E549, R180-E549, L181-E549, V182-E549, G183-E549, L184-E549, S185-E549, V186-E549, G187-E549, Q188-E549, M189-E549, H190-E549, V191-E549, T192-E549, K193-E549, L194-E549, A195-E549, E196-E549, P197-E549, L198-E549, E199-E549, I200-E549, V201-E549, F202-E549, S203-E549, H204-E549, Q205-E549, R206-E549, P207-E549, P208-E549, P209-E549, N210-E549, M211-E549, T212-E549, L213-E549, T214-E549, C215-E549, V216-E549, F217-E549, W218-E549, D219-E549, V220-E549, T221-E549, K222-E549, G223-E549, T224-E549, T225-E549, G226-E549, D227-E549, W228-E549, S229-E549, S230-E549, E231-E549, G232-E549, C233-E549, S234-E549, T235-E549, E236-E549, V237-E549, R238-E549, P239-E549, E240-E549, G241-E549, T242-E549, V243-E549, C244-E549, C245-E549, C246-E549, D247-E549, H248-E549, L249-E549, T250-E549, F251-E549, F252-E549, A253-E549, L254-E549, L255-E549, L256-E549, R257-E549, P258-E549, T259-E549, L260-E549, D261-E549, Q262-E549, S263-E549, T264-E549, V265-E549, H266-E549, I267-E549, L268-E549, T269-E549, R270-E549, I271-E549, S272-E549, Q273-E549, A274-E549, G275-E549, C276-E549, G277-E549, V278-E549, S279-E549, M280-E549, I281-E549, F282-E549, L283-E549, A284-E549, F285-E549, T286-E549, I287-E549, I288-E549, L289-E549, Y290-E549, A291-E549, F292-E549, L293-E549, R294-E549, L295-E549, S296-E549, R297-E549, E298-E549, R299-E549, F300-E549, K301-E549, S302-E549, E303-E549, D304-E549, A305-E549, P306-E549, K307-E549, I308-E549, H309-E549, V310-E549, A311-E549, L312-E549, G313-E549, G314-E549, S315-E549, L316-E549, F317-E549, L318-E549, L319-E549, N320-E549, L321-E549, A322-E549, F323-E549, L324-E549, V325-E549, N326-E549, V327-E549, G328-E549, S329-E549, G330-E549, S331-E549, K332-E549, G333-E549, S334-E549, D335-E549, A336-E549, A337-E549, C338-E549, W339-E549, A340-E549, R341-E549, G342-E549, A343-E549, V344-E549, F345-E549, H346-E549, Y347-E549, F348-E549, L349-E549, L350-E549, C351-E549, A352-E549, F353-E549, T354-E549, W355-E549, M356-E549, G357-E549, L358-E549, E359-E549, A360-E549, F361-E549, H362-E549, L363-E549, Y364-E549, L365-E549, L366-E549, A367-E549, V368-E549, R369-E549, V370-E549, F371-E549, N372-E549, T373-E549, Y374-E549, F375-E549, G376-E549, H377-E549, Y378-E549, F379-E549, L380-E549, K381-E549, L382-E549, S383-E549, L384-E549, V385-E549, G386-E549, W387-E549, G388-E549, L389-E549, P390-E549, A391-E549, L392-E549, M393-E549, V394-E549, T395-E549, G396-E549, T397-E549, G398-E549, S399-E549, A400-E549, N401-E549, S402-E549, Y403-E549, G404-E549, L405-E549, Y406-E549, T407-E549, I408-E549, R409-E549, D410-E549, R411-E549, E412-E549, N413-E549, R414-E549, T415-E549, S416-E549, L417-E549, E418-E549, L419-E549, C420-E549, W421-E549, F422-E549, R423-E549, E424-E549, G425-E549, T426-E549, T427-E549, M428-E549, Y429-E549, A430-E549, L431-E549, Y432-E549, I433-E549, T434-E549, V435-E549, H436-E549, G437-E549, Y438-E549, F439-E549, L440-E549, I441-E549, T442-E549, F443-E549, L444-E549, F445-E549, G446-E549, M447-E549, V448-E549, V449-E549, L450-E549, A451-E549, L452-E549, V453-E549, V454-E549, W455-E549, K456-E549, I457-E549, F458-E549, T459-E549, L460-E549, S461-E549, R462-E549, A463-E549, T464-E549, A465-E549, V466-E549, K467-E549, E468-E549, R469-E549, G470-E549, K471-E549, N472-E549, R473-E549, K474-E549, K475-E549, V476-E549, L477-E549, T478-E549, L479-E549, L480-E549, G481-E549, L482-E549, S483-E549, S484-E549, L485-E549, V486-E549, G487-E549, V488-E549, T489-E549, W490-E549, G491-E549, L492-E549, A493-E549, I494-E549, F495-E549, T496-E549, P497-E549, L498-E549, G499-E549, L500-E549, S501-E549, T502-E549, V503-E549, Y504-E549, I505-E549, F506-E549, A507-E549, L508-E549, F509-E549, N510-E549, S511-E549, L512-E549, Q513-E549, G514-E549, V515-E549, F516-E549, I517-E549, C518-E549, C519-E549, W520-E549, F521-E549, T522-E549, I523-E549, L524-E549, Y525-E549, L526-E549, P527-E549, S528-E549, Q529-E549, S530-E549, T531-E549, T532-E549, V533-E549, S534-E549, S535-E549, S536-E549, T537-E549, A538-E549, R539-E549, L540-E549, D541-E549, Q542-E549, and/or A543-E549 of SEQ ID NO:10. Polynucleotide sequences encoding these polypeptides are also provided. The present invention also encompasses the use of these N-terminal HGPRBMY41_{—}2 deletion polypeptides as immunogenic and/or antigenic epitopes as described elsewhere herein.

[0408] In preferred embodiments, the following C-terminal HGPRBMY41_{—}2 deletion polypeptides are encompassed by the present invention: M1-E549, M1-Q548, M1-S547, M1-A546, M1-S545, M1-H544, M1-A543, M1-Q542, M1-D541, M1-L540, M1-R539, M1-A538, M1-T537, M1-S536, M1-S535, M1-S534, M1-V533, M1-T532, M1-T531, M1-S530, M1-Q529, M1-S528, M1-P527, M1-L526, M1-Y525, M1-L524, M1-I523, M1-T522, M1-F521, M1-W520, M1-C519, M1-C518, M1-I517, M1-F516, M1-V515, M1-G514, M1-Q513, M1-L512, M1-S511, M1-N510, M1-F509, M1-L508, M1-A507, M1-F506, M1-I505, M1-Y504, M1-V503, M1-T502, M1-S501, M1-L500, M1-G499, M1-L498, M1-P497, M1-T496, M1-F495, M1-I494, M1-A493, M1-L492, M1-G491, M1-W490, M1-T489, M1-V488, M1-G487, M1-V486, M1-L485, M1-S484, M1-S483, M1-L482, M1-G481, M1-L480, M1-L479, M1-T478, M1-L477, M1-V476, M1-K475, M1-K474, M1-R473, M1-N472, M1-K471, M1-G470, M1-R469, M1-E468, M1-K467, M1-V466, M1-A465, M1-T464, M1-A463, M1-R462, M1-S461, M1-L460, M1-T459, M1-F458, M1-I457, M1-K456, M1-W455, M1-V454, M1-V453, M1-L452, M1-A451, M1-L450, M1-V449, M1-V448, M1-M447, M1-G446, M1-F445, M1-L444, M1-F443, M1-T442, M1-I441, M1-L440, M1-F439, M1-Y438, M1-G437, M1-H436, M1-V435, M1-T434, M1-I433, M1-Y432, M1-L431, M1-A430, M1-Y429, M1-M428, M1-T427, M1-T426, M1-G425, M1-E424, M1-R423, M1-F422, M1-W421, M1-C420, M1-L419, M1-E418, M1-L417, M1-S416, M1-T415, M1-R414, M1-N413, M1-E412, M1-R411, M1-D410, M1-R409, M1-I408, M1-T407, M1-Y406, M1-L405, M1-G404, M1-Y403, M1-S402, M1-N401, M1-A400, M1-S399, M1-G398, M1-T397, M1-G396, M1-I395, M1-V394, M1-M393, M1-L392, M1-A391, M1-P390, M1-L389, M1-G388, M1-W387, M1-G386, M1-V385, M1-L384, M1-S383, M1-L382, M1-K381, M1-L380, M1-F379, M1-Y378, M1-H377, M1-G376, M1-F375, M1-Y374, M1-T373, M1-N372, M1-F371, M1-V370, M1-R369, M1-V368, M1-A367, M1-L366, M1-L365, M1-Y364, M1-L363, M1-H362, M1-F361, M1-A360, M1-E359, M1-L358, M1-G357, M1-M356, M1-W355, M1-T354, M1-F353, M1-A352, M1-C351, M1-L350, M1-L349, M1-F348, M1-Y347, M1-H346, M1-F345, M1-V344, M1-A343, M1-G342, M1-R341, M1-A340, M1-W339, M1-C338, M1-A337, M1-A336, M1-D335, M1-S334, M1-G333, M1-K332, M1-S331, M1-G330, M1-S329, M1-G328, M1-V327, M1-N326, M1-V325, M1-L324, M1-F323, M1-A322, M1-L321, M1-N320, M1-L319, M1-L318, M1-F317, M1-L316, M1-S315, M1-G314, M1-G313, M1-L312, M1-A311, M1-V310, M1-H309, M1-I308, M1-K307, M1-P306, M1-A305, M1-D304, M1-E303, M1-S302, M1-K301, M1-F300, M1-R299, M1-E298, M1-R297, M1-S296, M1-L295, M1-R294, M1-L293, M1-F292, M1-A291, M1-Y290, M1-L289, M1-I288, M1-I287, M1-T286, M1-F285, M1-A284, M1-L283, M1-F282, M1-I281, M1-M280, M1-S279, M1-V278, M1-G277, M1-C276, M1-G275, M1-A274, M1-Q273, M1-S272, M1-I271, M1-R270, M1-T269, M1-L268, M1-I267, M1-H266, M1-V265, M1-T264, M1-S263, M1-Q262, M1-D261, M1-L260, M1-T259, M1-P258, M1-R257, M1-L256, M1-L255, M1-L254, M1-A253, M1-F252, M1-F251, M1-T250, M1-L249, M1-H248, M1-D247, M1-C246, M1-C245, M1-C244, M1-V243, M1-T242, M1-G241, M1-E240, M1-P239, M1-R238, M1-V237, M1-E236, M1-T235, M1-S234, M1-C233, M1-G232, M1-E231, M1-S230, M1-S229, M1-W228, M1-D227, M1-G226, M1-T225, M1-T224, M1-G223, M1-K222, M1-T221, M1-V220, M1-D219, M1-W218, M1-F217, M1-V216, M1-C215, M1-T214, M1-L213, M1-T212, M1-M211, M1-N210, M1-P209, M1-P208, M1-P207, M1-R206, M1-Q205, M1-H204, M1-S203, M1-F202, M1-V201, M1-I200, M1-E199, M1-L198, M1-P197, M1-E196, M1-A195, M1-L194, M1-K193, M1-T192, M1-V191, M1-H190, M1-M189, M1-Q188, M1-G187, M1-V186, M1-S185, M1-L184, M1-G183, M1-V182, M1-L181, M1-R180, M1-N179, M1-N178, M1-L177, M1-V176, M1-G175, M1-S174, M1-G173, M1-D172, M1-G171, M1-L170, M1-G169, M1-L168, M1-R167, M1-P166, M1-G165, M1-K164, M1-F163, M1-L162, M1-T161, M1-G160, M1-P159, M1-G158, M1-I157, M1-D156, M1-L155, M1-I154, M1-T153, M1-V152, M1-A151, M1-L150, M1-R149, M1-V148, M1-V147, M1-S146, M1-R145, M1-N144, M1-G143, M1-P142, M1-L141, M1-S140, M1-R139, M1-F138, M1-L137, M1-S136, M1-K135, M1-P134, M1-L133, M1-R132, M1-V131, M1-R130, M1-D129, M1-P128, M1-P127, M1-K126, M1-D125, M1-E124, M1-D123, M1-K122, M1-M121, M1-V120, M1-Q119, M1-R118, M1-P117, M1-V116, M1-Q115, M1-S114, M1-P113, M1-E112, M1-L111, M1-S110, M1-F109, M1-Y108, M1-F107, M1-D106, M1-E105, M1-A104, M1-T103, M1-N102, M1-T101, M1-S100, M1-L99, M1-N98, M1-Q97, M1-V96, M1-L95, M1-A94, M1-K93, M1-L92, M1-F91, M1-P90, M1-T89, M1-N88, M1-V87, M1-K86, M1-Q85, M1-T84, M1-L83, M1-G82, M1-E81, M1-K80, M1-M79, M1-L78, M1-H77, M1-A76, M1-E75, M1-Y74, M1-N73, M1-L72, M1-W71, M1-Y70, M1-R69, M1-Q68, M1-L67, M1-N66, M1-E65, M1-V64, M1-N63, M1-C62, M1-S61, M1-D60, M1-S59, M1-G58, M1-S57, M1-Q56, M1-R55, M1-C54, M1-K53, M1-T52, M1-F51, M1-C50, M1-L49, M1-A48, M1-K47, M1-D46, M1-N45, M1-L44, M1-N43, M1-F42, M1-I141, M1-D40, M1-Y39, M1-M38, M1-N37, M1-N36, M1-S35, M1-G34, M1-L33, M1-C32, M1-T31, M1-N30, M1-R29, M1-P28, M1-G27, M1-E26, M1-T25, M1-P24, M1-K23, M1-E22, M1-Q21, M1-G20, M1-S19, M1-T18, M1-P17, M1-L16, M1-L15, M1-L14, M1-L13, M1-L12, M1-L11, M1-L10, M1-A9, M1-G8, and/or M1-L7 of SEQ ID NO:10. Polynucleotide sequences encoding these polypeptides are also provided. The present invention also encompasses the use of these C-terminal HGPRBMY41_{—}2 deletion polypeptides as immunogenic and/or antigenic epitopes as described elsewhere herein.

[0409] Alternatively, preferred polypeptides of the present invention may comprise polypeptide sequences corresponding to, for example, internal regions of the HGPRBMY41_{—}2 polypeptide (e.g., any combination of both N- and C-terminal HGPRBMY41_{—}2 polypeptide deletions) of SEQ ID NO:10. For example, internal regions could be defined by the equation: amino acid NX to amino acid CX, wherein NX refers to any N-terminal deletion polypeptide amino acid of HGPRBMY41_{—}2 (SEQ ID NO:10), and where CX refers to any C-terminal deletion polypeptide amino acid of HGPRBMY41_{—}2 (SEQ ID NO:10). Polynucleotides encoding these polypeptides are also provided. The present invention also encompasses the use of these polypeptides as an immunogenic and/or antigenic epitope as described elsewhere herein.

[0410] The present invention also encompasses immunogenic and/or antigenic epitopes of the HGPRBMY41_{—}2 polypeptide.

[0411] The HGPRBMY41_{—}2 polypeptides of the present invention were determined to comprise several phosphorylation sites based upon the Motif algorithm (Genetics Computer Group, Inc.). The phosphorylation of such sites may regulate some biological activity of the HGPRBMY41_{—}2 polypeptide. For example, phosphorylation at specific sites may be involved in regulating the proteins ability to associate or bind to other molecules (e.g., proteins, ligands, substrates, DNA, etc.). In the present case, phosphorylation may modulate the ability of the HGPRBMY41_{—}2 polypeptide to associate with other polypeptides, particularly cognate ligand for HGPRBMY41_{—}2, or its ability to modulate certain cellular signal pathways.

[0412] The HGPRBMY41_{—}2 polypeptide was predicted to comprise four PKC phosphorylation sites using the Motif algorithm (Genetics Computer Group, Inc.). In vivo, protein kinase C exhibits a preference for the phosphorylation of serine or threonine residues. The PKC phosphorylation sites have the following consensus pattern: [ST]-x-[RK], where S or T represents the site of phosphorylation and ‘x’ an intervening amino acid residue. Additional information regarding PKC phosphorylation sites can be found in Woodget J. R., Gould K. L., Hunter T., Eur. J. Biochem. 161:177-184(1986), and Kishimoto A., Nishiyama K., Nakanishi H., Uratsuji Y., Nomura H., Takeyama Y., Nishizuka Y., J. Biol. Chem. 260:12492-12499(1985); which are hereby incorporated by reference herein.

[0413] In preferred embodiments, the following PKC phosphorylation site polypeptides are encompassed by the present invention: MATPRGLGAL (SEQ ID NO:262), MKEGLTQKVNTPF (SEQ ID NO:263), SYGLYTIRDRENR (SEQ ID NO:264), and/or TVSSSTARLDQAH (SEQ ID NO:265). Polynucleotides encoding these polypeptides are also provided. The present invention also encompasses the use of the HGPRBMY41_{—}2 PKC phosphorylation site polypeptides as immunogenic and/or antigenic epitopes as described elsewhere herein.

[0414] The HGPRBMY41_{—}2 polypeptide was predicted to comprise seven casein kinase II phosphorylation sites using the Motif algorithm (Genetics Computer Group, Inc.). Casein kinase II (CK-2) is a protein serine/threonine kinase whose activity is independent of cyclic nucleotides and calcium. CK-2 phosphorylates many different proteins. The substrate specificity [1] of this enzyme can be summarized as follows: (1) Under comparable conditions Ser is favored over Thr.; (2) An acidic residue (either Asp or Glu) must be present three residues from the C-terminal of the phosphate acceptor site; (3) Additional acidic residues in positions +1, +2, +4, and +5 increase the phosphorylation rate. Most physiological substrates have at least one acidic residue in these positions; (4) Asp is preferred to Glu as the provider of acidic determinants; and (5) A basic residue at the N-terminal of the acceptor site decreases the phosphorylation rate, while an acidic one will increase it.

[0415] A consensus pattern for casein kinase II phosphorylations site is as follows: [ST]-x(2)-[DE], wherein ‘x’ represents any amino acid, and S or T is the phosphorylation site.

[0416] Additional information specific to casein kinase II phosphorylation site-II domains may be found in reference to the following publication: Pinna L. A., Biochim. Biophys. Acta 1054:267-284(1990); which is hereby incorporated herein in its entirety.

[0417] In preferred embodiments, the following casein kinase II phosphorylation site polypeptide is encompassed by the present invention: LLLPTSGQEKPTEG (SEQ ID NO:266), TKCRQSGSDSCNVE (SEQ ID NO:267), NLSTNTAEDFYFSL (SEQ ID NO:268), VRLAVTILDIGPGT (SEQ ID NO:269), DVTKGTTGDWSSEG (SEQ ID NO:270), SYGLYTIRDRENRT (SEQ ID NO:271), and/or DRENRTSLELCWFR (SEQ ID NO:272). Polynucleotides encoding these polypeptides are also provided. The present invention also encompasses the use of this casein kinase II phosphorylation site polypeptide as an immunogenic and/or antigenic epitope as described elsewhere herein.

[0418] The HGPRBMY41_{—}2 polypeptide has been shown to comprise four glycosylation sites according to the Motif algorithm (Genetics Computer Group, Inc.). As discussed more specifically herein, protein glycosylation is thought to serve a variety of functions including: augmentation of protein folding, inhibition of protein aggregation, regulation of intracellular trafficking to organelles, increasing resistance to proteolysis, modulation of protein antigenicity, and mediation of intercellular adhesion.

[0419] Asparagine glycosylation sites have the following consensus pattern, N-{P}-[ST]-{P}, wherein N represents the glycosylation site. However, it is well known that that potential N-glycosylation sites are specific to the consensus sequence Asn-Xaa-Ser/Thr. However, the presence of the consensus tripeptide is not sufficient to conclude that an asparagine residue is glycosylated, due to the fact that the folding of the protein plays an important role in the regulation of N-glycosylation. It has been shown that the presence of proline between Asn and Ser/Thr will inhibit N-glycosylation; this has been confirmed by a recent statistical analysis of glycosylation sites, which also shows that about 50% of the sites that have a proline C-terminal to Ser/Thr are not glycosylated. Additional information relating to asparagine glycosylation may be found in reference to the following publications, which are hereby incorporated by reference herein: Marshall R. D., Annu. Rev. Biochem. 41:673-702(1972); Pless D. D., Lennarz W. J., Proc. Natl. Acad. Sci. U.S.A. 74:134-138(1977); Bause E., Biochem. J. 209:331-336(1983); Gavel Y., von Heijne G., Protein Eng. 3:433-442(1990); and Miletich J. P., Broze G. J. Jr., J. Biol. Chem. 265:11397-11404(1990).

[0420] In preferred embodiments, the following asparagine glycosylation site polypeptides are encompassed by the present invention: KALVQNLSTNTAED (SEQ ID NO:273), RSLPGNRSVVRLAV (SEQ ID NO:274), QR PPPNMTLTCVFW (SEQ ID NO:275), and/or IRDRENRTSLELCW (SEQ ID NO:276). Polynucleotides encoding these polypeptides are also provided. The present invention also encompasses the use of these HGPRBMY41_{—}2 asparagine glycosylation site polypeptide as immunogenic and/or antigenic epitopes as described elsewhere herein.

[0421] The HGPRBMY41_{—}2 polypeptide was predicted to comprise twelve N-myristoylation sites using the Motif algorithm (Genetics Computer Group, Inc.). An appreciable number of eukaryotic proteins are acylated by the covalent addition of myristate (a C14-saturated fatty acid) to their N-terminal residue via an amide linkage. The sequence specificity of the enzyme responsible for this modification, myristoyl CoA:protein N-myristoyl transferase (NMT), has been derived from the sequence of known N-myristoylated proteins and from studies using synthetic peptides. The specificity seems to be the following: i.) The N-terminal residue must be glycine; ii.) In position 2, uncharged residues are allowed; iii.) Charged residues, proline and large hydrophobic residues are not allowed; iv.) In positions 3 and 4, most, if not all, residues are allowed; v.) In position 5, small uncharged residues are allowed (Ala, Ser, Thr, Cys, Asn and Gly). Serine is favored; and vi.) In position 6, proline is not allowed.

[0422] A consensus pattern for N-myristoylation is as follows: G-{EDRKHPFYW}-x(2)-[STAGCN]-{P}, wherein ‘x’ represents any amino acid, and G is the N-myristoylation site.

[0423] Additional information specific to N-myristoylation sites may be found in reference to the following publication: Towler D. A., Gordon J. I., Adams S. P., Glaser L., Annu. Rev. Biochem. 57:69-99(1988); and Grand R. J. A., Biochem. J. 258:625-638(1989); which is hereby incorporated herein in its entirety.

[0424] In preferred embodiments, the following N-myristoylation site polypeptides are encompassed by the present invention: KCRQSGSDSCNVENLQ (SEQ ID NO:277), KGPRLGLGDGSGVLNN (SEQ ID NO:278), LGDGSGVLNNRLVGLS (SEQ ID NO:279), NNRLVGLSVGQMHVTK (SEQ ID NO:280), EVRPEGTVCCCDHLTF (SEQ ID NO:281), RISQAGCGVSMIFLAF (SEQ ID NO:282), VNVGSGSKGSDAACWA (SEQ ID NO:283), GSGSKGSDAACWARGA (SEQ ID NO:284), ALMVIGTGSANSYGLY (SEQ ID NO:285), MVIGTGSANSYGLYTI (SEQ ID NO:286), LSSLVGVTWGLAIFTP (SEQ ID NO:287), and/or FNSLQGVFICCWFTIL (SEQ ID NO:288). Polynucleotides encoding these polypeptides are also provided. The present invention also encompasses the use of these N-myristoylation site polypeptides as immunogenic and/or antigenic epitopes as described elsewhere herein.

[0425] Many polynucleotide sequences, such as EST sequences, are publicly available and accessible through sequence databases. Some of these sequences are related to SEQ ID NO:9and may have been publicly available prior to conception of the present invention. Preferably, such related polynucleotides are specifically excluded from the scope of the present invention. To list every related sequence would be cumbersome. Accordingly, preferably excluded from the present invention are one or more polynucleotides consisting of a nucleotide sequence described by the general formula of a-b, where a is any integer between 1 to 1636 of SEQ ID NO:9, b is an integer between 15 to 1650, where both a and b correspond to the positions of nucleotide residues shown in SEQ ID NO:9, and where b is greater than or equal to a+14

[0426] Features of the Polypeptide Encoded by Gene No:6

[0427] The polypeptide of this gene provided as SEQ ID NO:12 (FIGS. 6A-B), encoded by the polynucleotide sequence according to SEQ ID NO:11 (FIGS. 6A-B), and/or encoded by the polynucleotide contained within the deposited clone, HGPRBMY41_{—}3 (also referred to as GPCR-169 splice variant 3), has significant homology at the nucleotide and amino acid level to a number of G-protein coupled receptors, which include, for example, other G-protein coupled receptors, specifically, the human TM7XN1 protein precursor protein (095966; SWISS-PROT Accession No: 095966; SEQ ID NO:40); the human putative G-protein-coupled receptor protein (Q9Y653; SWISS-PROT Accession No: Q9Y653; SEQ ID NO:41); the mouse serpentine receptor protein (Q9QZT2; SWISS-PROT Accession No: Q9QZT2; SEQ ID NO:42); the human DJ287G14.2 G-protein-coupled receptor protein (Q9Y3KO; SWISS-PROT Accession No: Q9Y3KO; SEQ ID NO:43); and the human EGF-like module EMR2 protein (Q9UHX3; SWISS-PROT Accession No: Q9UHX3; SEQ ID NO:44). An alignment of the HGPRBMY41_{—}3, polypeptide with these proteins is provided in FIGS. 18A-C.

[0428] The determined nucleotide sequence of the HGPRBMY41_{—}3, cDNA in FIGS. 6A-B (SEQ ID NO:11) contains an open reading frame encoding a protein of about 455 amino acid residues, with a deduced molecular weight of about 50.4 kDa. The amino acid sequence of the predicted HGPRBMY41_{—}3 polypeptide is shown in FIGS. 6A-B (SEQ ID NO:12). The HGPRBMY41_{—}3 protein shown in FIGS. 6A-B was determined to share significant identity and similarity to several known G-protein coupled receptors, as shown in FIGS. 18A-C. The percent identity and similarity values between the HGPRBMY41_{—}3 polypeptide to these known G-protein coupled receptors is provided in FIG. 24.

[0429] The HGPRBMY41_{—}3 polynucleotide (SEQ ID NO:11) and polypeptide (SEQ ID NO:12) represents a novel splice variant form of the HGPBMY41_{—}1 polynucleotide (SEQ ID NO:7) and polypeptide (SEQ ID NO:8) of the present invention.

[0430] The HGPRBMY41_{—}3 polypeptide was also determined to comprise several conserved cysteines which are denoted by dark shading, in addition to other identical residues, as shown in FIGS. 18A-C. Conservation of cysteines at key amino acid residues is indicative of conserved structural features, which may correlate with conservation of protein function and/or activity.

[0431] Expression profiling designed to measure the steady state mRNA levels encoding the HGPRBMY41_{—}1 polypeptide showed predominately high expression levels in bone marrow; significantly in the lung, spleen, and to a lesser extent, in other tissues as shown (See FIG. 23). The expression profile of the HGPRBMY41_{—}3 splice variant is expected to be the same or similar to the HGPRBMY41_{—}1 polypeptide.

[0432] Moreover, HGPRBMY41_{—}3 is also expected to share the same or similar level of differential expression in ovarian, stomach, colon, and kidney tumors as observed for HGPRBMY41_{—}1 (see FIG. 40). Likewise, HGPRBMY41_{—}3 may represent a potential target for identifying small molecule modulators of HGPRBMY41_{—}3 function and may represent a novel therapeutic option in the treatment of ovarian, stomach, colon, and kidney cancers, or proliferative conditions of the ovarian, stomach, colon, and kidney.

[0433] Based upon the strong homology to members of the G-protein coupled receptor proteins, the HGPRBMY41_{—}3 polypeptide is expected to share at least some biological activity with G-protein coupled receptors, specifically serpentine receptors, and/or the human EGF-like module EMR2 protein, and more preferably with G-protein coupled receptors found within bone marrow, lung, and/or spleen, in addition to the G-protein coupled receptors referenced elsewhere herein.

[0434] The HGPRBMY41_{—}3 polynucleotides and polypeptides of the present invention, including agonists and/or fragments thereof, have uses that include detecting, prognosing, treating, preventing, and/or ameliorating the following diseases and/or disorders, neural disorders, metabolic disorders, gastrointestinal disorders, reproductive disorders, Alzheimer's, Parkinson's, diabetes, dwarfism, color blindness, retinal pigmentosa and asthma, depression, schizophrenia, sleeplessness, hypertension, anxiety, stress, renal failure, acute heart failure, hypotension, hypertension, endocrinal diseases, growth disorders, neuropathic pain, obesity, anorexia, HIV infections, cancers, bulimia, asthma, Parkinson's disease, osteoporosis, angina pectoris, myocardial infarction, psychotic, metabolic, cardiovascular and neurological disorders. Also, compounds acting on this receptor can be used as taste modifiers.

[0435] The HGPRBMY41_{—}3 polynucleotides and polypeptides of the present invention, including agonists and/or fragments thereof, have uses that include modulating signal transduction activity, in various cells, tissues, and organisms, and particularly in mammalian bone marrow, lung, and/or spleen; preferably human tissue.

[0436] The strong homology to G-protein coupled receptors, particularly serpentine receptors and EGF-like receptors, combined with the predominate localized expression of HGPRBMY41_{—}1 in bone marrow and spleen tissue suggests the HGPRBMY41_{—}3 polynucleotides and polypeptides may be useful in treating, diagnosing, prognosing, and/or preventing immune diseases and/or disorders. Representative uses are described in the “Immune Activity”, “Chemotaxis”, and “Infectious Disease” sections below, and elsewhere herein. Briefly, the strong expression in immune tissue indicates a role in regulating the proliferation; survival; differentiation; and/or activation of hematopoietic cell lineages, including blood stem cells.

[0437] The HGPRBMY41_{—}3 polypeptide may also be useful as a preventative agent for immunological disorders including arthritis, asthma, immunodeficiency diseases such as AIDS, leukemia, rheumatoid arthritis, granulomatous disease, inflammatory bowel disease, sepsis, acne, neutropenia, neutrophilia, psoriasis, hypersensitivities, such as T-cell mediated cytotoxicity; immune reactions to transplanted organs and tissues, such as host-versus-graft and graft-versus-host diseases, or autoimmunity disorders, such as autoimmune infertility, lense tissue injury, demyelination, systemic lupus erythematosis, drug induced hemolytic anemia, rheumatoid arthritis, Sjogren's disease, and scieroderma. The HGPRBMY41_{—}3 polypeptide may be useful for modulating cytokine production, antigen presentation, or other processes, such as for boosting immune responses, etc.

[0438] Moreover, the protein may represent a factor that influences the differentiation or behavior of other blood cells, or that recruits hematopoietic cells to sites of injury. Thus, this gene product is thought to be useful in the expansion of stem cells and committed progenitors of various blood lineages, and in the differentiation and/or proliferation of various cell types. Furthermore, the protein may also be used to determine biological activity, raise antibodies, as tissuemarkers, to isolate cognate ligands or receptors, to identify agents that modulate their interactions, in addition to its use as a nutritional supplement. Protein, as well as, antibodies directed against the protein may show utility as a tumor marker and/or immunotherapy targets for the above listed tissues.

[0439] The strong homology to G-protein coupled receptors, particularly serpentine receptors and EGF-like receptors, combined with the predominate localized expression of HGPRBMY41_{—}1 in bone marrow and spleen tissue suggests the potential utility for HGPRBMY41_{—}3 polynucleotides and polypeptides in treating, diagnosing, prognosing, and/or preventing pulmonary diseases and disorders which include the following, not limiting examples: ARDS, emphysema, cystic fibrosis, interstitial lung disease, chronic obstructive pulmonary disease, bronchitis, lymphangioleiomyomatosis, pneumonitis, eosinophilic pneumonias, granulomatosis, pulmonary infarction, pulmonary fibrosis, pneumoconiosis, alveolar hemorrhage, neoplasms, lung abscesses, empyema, and increased susceptibility to lung infections (e.g., immumocompromised, HIV, etc.), for example.

[0440] Moreover, polynucleotides and polypeptides, including fragments and/or antagonists thereof, have uses which include, directly or indirectly, treating, preventing, diagnosing, and/or prognosing the following, non-limiting, pulmonary infections: pnemonia, bacterial pnemonia, viral pnemonia (for example, as caused by Influenza virus, Respiratory syncytial virus, Parainfluenza virus, Adenovirus, Coxsackievirus, Cytomegalovirus, Herpes simplex virus, Hantavirus, etc.), mycobacteria pnemonia (for example, as caused by Mycobacterium tuberculosis, etc.) mycoplasma pnemonia, fungal pnemonia (for example, as caused by Pneumocystis carinii, Histoplasma capsulatum, Coccidioides immitis, Blastomyces dermatitidis, Candida sp., Cryptococcus neoformans, Aspergillus sp., Zygomycetes, etc.), Legionnaires' Disease, Chlamydia pnemonia, aspiration pnemonia, Nocordia sp. Infections, parasitic pnemonia (for example, as caused by Strongyloides, Toxoplasma gondii, etc.) necrotizing pnemonia, in addition to any other pulmonary disease and/or disorder (e.g., non-pneumonia) implicated by the causative agents listed above or elsewhere herein.

[0441] The HGPRBMY41_{—}3 polynucleotides and polypeptides, including fragments and agonists thereof, may have uses which include, either directly or indirectly, for boosting immune responses.

[0442] The HGPRBMY41_{—3} polynucleotides and polypeptides, including fragments and/or modulators thereof, may have uses which include identification of modulators of HGPRBMY41_{—}3 function including antibodies (for detection or neutralization), naturally-occurring modulators and small molecule modulators. Antibodies to domains of the HGPRBMY41_{—}3 protein could be used as diagnostic agents of cardiovascular and inflammatory conditions in patients, are useful in monitoring the activation of signal transduction pathways, and can be used as a biomarker for the involvement of G-protein couplded receptors in disease states, and in the evaluation of inhibitors of G-protein coupled receptors in vivo.

[0443] HGPRBMY41_{—}3 polypeptides and polynucleotides have additional uses which include diagnosing diseases related to the over and/or under expression of HGPRBMY41_{—}3 by identifying mutations in the HGPRBMY41_{—}3 gene by using HGPRBMY41_{—}3 sequences as probes or by determining HGPRBMY41_{—}3 protein or mRNA expression levels. HGPRBMY41_{—}3 polypeptides may be useful for screening compounds that affect the activity of the protein. HGPRBMY41_{—}3 peptides can also be used for the generation of specific antibodies and as bait in yeast two hybrid screens to find proteins the specifically interact with HGPRBMY41_{—}3 (described elsewhere herein).

[0444] Although it is believed the encoded polypeptide may share at least some biological activities with human G-protein coupled receptor proteins (particularly G-protein coupled receptors belonging to the serpentine receptor family and/or EGF-like receptor family), a number of methods of determining the exact biological function of this clone are either known in the art or are described elsewhere herein. Briefly, the function of this clone may be determined by applying microarray methodology. Nucleic acids corresponding to the HGPRBMY41_{—}3 polynucleotides, in addition to, other clones of the present invention, may be arrayed on microchips for expression profiling. Depending on which polynucleotide probe is used to hybridize to the slides, a change in expression of a specific gene may provide additional insight into the function of this gene based upon the conditions being studied. For example, an observed increase or decrease in expression levels when the polynucleotide probe used comes from diseased bone marrow tissue, as compared to, normal tissue might indicate a function in modulating bone marrow function, for example. In the case of HGPRBMY41_{—}3, bone marrow, lung, and/or spleen tissue should be used, for example, to extract RNA to prepare the probe.

[0445] In addition, the function of the protein may be assessed by applying quantitative PCR methodology, for example. Real time quantitative PCR would provide the capability of following the expression of the HGPRBMY41_{—}3 gene throughout development, for example. Quantitative PCR methodology requires only a nominal amount of tissue from each developmentally important step is needed to perform such experiments. Therefore, the application of quantitative PCR methodology to refining the biological function of this polypeptide is encompassed by the present invention. In the case of HGPRBMY41_{—}3, a disease correlation related to HGPRBMY41_{—}3 may be made by comparing the mRNA expression level of HGPRBMY41_{—}3 in normal tissue, as compared to diseased tissue (particularly diseased tissue isolated from the following: bone marrow, lung, and/or spleen tissue). Significantly higher or lower levels of HGPRBMY41_{—}3 expression in the diseased tissue may suggest HGPRBMY41_{—}3 plays a role in disease progression, and antagonists against HGPRBMY41_{—}3 polypeptides would be useful therapeutically in treating, preventing, and/or ameliorating the disease. Alternatively, significantly higher or lower levels of HGPRBMY41_{—}3 expression in the diseased tissue may suggest HGPRBMY41_{—}3 plays a defensive role against disease progression, and agonists of HGPRBMY41_{—}3 polypeptides may be useful therapeutically in treating, preventing, and/or ameliorating the disease. Also encompassed by the present invention are quantitative PCR probes corresponding to the polynucleotide sequence provided as SEQ ID NO:11 (FIGS. 6A-B).

[0446] The function of the protein may also be assessed through complementation assays in yeast. For example, in the case of the HGPRBMY41_{—}3, transforming yeast deficient in serpentine or EGF-like receptor activity, for example, and assessing their ability to grow would provide convincing evidence the HGPRBMY41_{—}3 polypeptide has olfactory receptor activity. Additional assay conditions and methods that may be used in assessing the function of the polynucleotides and polypeptides of the present invention are known in the art, some of which are disclosed elsewhere herein.

[0447] Alternatively, the biological function of the encoded polypeptide may be determined by disrupting a homologue of this polypeptide in Mice and/or rats and observing the resulting phenotype. Such knock-out experiments are known in the art, some of which are disclosed elsewhere herein.

[0448] Moreover, the biological function of this polypeptide may be determined by the application of antisense and/or sense methodology and the resulting generation of transgenic mice and/or rats. Expressing a particular gene in either sense or antisense orientation in a transgenic mouse or rat could lead to respectively higher or lower expression levels of that particular gene. Altering the endogenous expression levels of a gene can lead to the observation of a particular phenotype that can then be used to derive indications on the function of the gene. The gene can be either over-expressed or under expressed in every cell of the organism at all times using a strong ubiquitous promoter, or it could be expressed in one or more discrete parts of the organism using a well characterized tissue-specific promoter (e.g., bone marrow, lung, and/or spleen tissue-specific promoter), or it can be expressed at a specified time of development using an inducible and/or a developmentally regulated promoter.

[0449] In the case of HGPRBMY41_{—}3 transgenic mice or rats, if no phenotype is apparent in normal growth conditions, observing the organism under diseased conditions (immune, hematopoietic, pulmonary diseases, in addition to cancers, etc.) may lead to understanding the function of the gene. Therefore, the application of antisense and/or sense methodology to the creation of transgenic mice or rats to refine the biological function of the polypeptide is encompassed by the present invention.

[0450] In preferred embodiments, the following N-terminal HGPRBMY41_{—}3 deletion polypeptides are encompassed by the present invention: M1-E455, A2-E455, T3-E455, P4-E455, R5-E455, G6-E455, L7-E455, G8-E455, A9-E455, L10-E455, L11-E455, L12-E455, L13-E455, L14-E455, L15-E455, L16-E455, P17-E455, T18-E455, S19-E455, G20-E455, Q21-E455, E22-E455, K23-E455, P24-E455, T25-E455, E26-E455, G27-E455, P28-E455, R29-E455, N30-E455, T31-E455, C32-E455, L33-E455, G34-E455, S35-E455, N36-E455, N37-E455, M38-E455, Y39-E455, D40-E455, I41-E455, F42-E455, N43-E455, L44-E455, N45-E455, D46-E455, K47-E455, A48-E455, L49-E455, C50-E455, F51-E455, T52-E455, K53-E455, C54-E455, R55-E455, Q56-E455, S57-E455, G58-E455, S59-E455, D60-E455, S61-E455, C62-E455, N63-E455, V64-E455, E65-E455, N66-E455, L67-E455, Q68-E455, R69-E455, Y70-E455, W71-E455, L72-E455, N73-E455, Y74-E455, E75-E455, A76-E455, H77-E455, L78-E455, M79-E455, K80-E455, E81-E455, G82-E455, L83-E455, T84-E455, Q85-E455, K86-E455, V87-E455, N88-E455, T89-E455, P90-E455, F91-E455, L92-E455, K93-E455, A94-E455, L95-E455, V96-E455, Q97-E455, N98-E455, L99-E455, S100-E455, T101-E455, N102-E455, T103-E455, A104-E455, E105-E455, D106-E455, F107-E455, Y108-E455, F109-E455, S110-E455, L111-E455, E112-E455, P113-E455, S114-E455, Q115-E455, V116-E455, P117-E455, R118-E455, Q119-E455, V120-E455, M121-E455, K122-E455, D123-E455, E124-E455, D125-E455, K126-E455, P127-E455, P128-E455, D129-E455, R130-E455, V131-E455, R132-E455, L133-E455, P134-E455, K135-E455, S136-E455, L137-E455, F138-E455, R139-E455, S140-E455, L141-E455, P142-E455, G143-E455, N144-E455, R145-E455, S146-E455, V147-E455, V148-E455, R149-E455, L150-E455, A151-E455, V152-E455, T153-E455, I154-E455, L155-E455, D156-E455, I157-E455, G158-E455, P159-E455, G160-E455, T161-E455, L162-E455, F163-E455, K164-E455, G165-E455, P166-E455, R167-E455, L168-E455, G169-E455, L170-E455, G171-E455, D172-E455, G173-E455, S174-E455, G175-E455, V176-E455, L177-E455, N178-E455, N179-E455, R180-E455, L181-E455, V182-E455, G183-E455, L184-E455, S185-E455, V186-E455, G187-E455, Q188-E455, M189-E455, H190-E455, V191-E455, T192-E455, K193-E455, L194-E455, A195-E455, E196-E455, P197-E455, L198-E455, E199-E455, I200-E455, V201-E455, F202-E455, S203-E455, H204-E455, Q205-E455, R206-E455, P207-E455, P208-E455, P209-E455, N210-E455, M211-E455, T212-E455, L213-E455, T214-E455, C215-E455, V216-E455, F217-E455, W218-E455, D219-E455, V220-E455, T221-E455, K222-E455, G223-E455, T224-E455, T225-E455, G226-E455, D227-E455, W228-E455, S229-E455, S230-E455, E231-E455, G232-E455, C233-E455, S234-E455, T235-E455, E236-E455, V237-E455, R238-E455, P239-E455, E240-E455, G241-E455, T242-E455, V243-E455, C244-E455, C245-E455, C246-E455, D247-E455, H248-E455, L249-E455, T250-E455, F251-E455, F252-E455, A253-E455, L254-E455, L255-E455, L256-E455, R257-E455, P258-E455, T259-E455, L260-E455, D261-E455, Q262-E455, S263-E455, T264-E455, V265-E455, H266-E455, I267-E455, L268-E455, T269-E455, R270-E455, I271-E455, S272-E455, Q273-E455, A274-E455, G275-E455, C276-E455, G277-E455, V278-E455, S279-E455, M280-E455, I281-E455, F282-E455, L283-E455, A284-E455, F285-E455, T286-E455, I287-E455, I288-E455, L289-E455, Y290-E455, A291-E455, F292-E455, L293-E455, R294-E455, P295-E455, A296-E455, and/or R297-E455 of SEQ ID NO:12. Polynucleotide sequences encoding these polypeptides are also provided. The present invention also encompasses the use of these N-terminal HGPRBMY41_{—}3 deletion polypeptides as immunogenic and/or antigenic epitopes as described elsewhere herein.

[0451] In preferred embodiments, the following C-terminal HGPRBMY41_{—}3 deletion polypeptides are encompassed by the present invention: M1-E455, M1-Q454, M1-S453, M1-A452, M1-S451, M1-H450, M1-A449, M1-Q448, M1-D447, M1-L446, M1-R445, M1-A444, M1-T443, M1-S442, M1-S441, M1-S440, M1-V439, M1-T438, M1-T437, M1-S436, M1-Q435, M1-S434, M1-P433, M1-L432, M1-Y431, M1-L430, M1-I429, M1-T428, M1-F427, M1-W426, M1-C425, M1-C424, M1-I423, M1-F422, M1-V421, M1-G420, M1-Q419, M1-L418, M1-S417, M1-N416, M1-F415, M1-L414, M1-A413, M1-F412, M1-I411, M1-Y410, M1-V409, M1-T408, M1-S407, M1-L406, M1-G405, M1-L404, M1-P403, M1-T402, M1-F401, M1-I400, M1-A399, M1-L398, M1-G397, M1-W396, and/or M1-T395 of SEQ ID NO:12. Polynucleotide sequences encoding these polypeptides are also provided. The present invention also encompasses the use of these C-terminal HGPRBMY41_{—}3 deletion polypeptides as immunogenic and/or antigenic epitopes as described elsewhere herein.

[0452] Alternatively, preferred polypeptides of the present invention may comprise polypeptide sequences corresponding to, for example, internal regions of the HGPRBMY41_{—}3 polypeptide (e.g., any combination of both N- and C-terminal HGPRBMY41_{—}3 polypeptide deletions) of SEQ ID NO:12. For example, internal regions could be defined by the equation: amino acid NX to amino acid CX, wherein NX refers to any N-terminal deletion polypeptide amino acid of HGPRBMY41_{—}3 (SEQ ID NO:12), and where CX refers to any C-terminal deletion polypeptide amino acid of HGPRBMY41_{—}3 (SEQ ID NO:12). Polynucleotides encoding these polypeptides are also provided. The present invention also encompasses the use of these polypeptides as an immunogenic and/or antigenic epitope as described elsewhere herein.

[0453] The present invention also encompasses immunogenic and/or antigenic epitopes of the HGPRBMY41_{—}3 polypeptide.

[0454] The HGPRBMY41_{—}3 polypeptides of the present invention were determined to comprise several phosphorylation sites based upon the Motif algorithm (Genetics Computer Group, Inc.). The phosphorylation of such sites may regulate some biological activity of the HGPRBMY41_{—}3 polypeptide. For example, phosphorylation at specific sites may be involved in regulating the proteins ability to associate or bind to other molecules (e.g., proteins, ligands, substrates, DNA, etc.). In the present case, phosphorylation may modulate the ability of the HGPRBMY41_{—}3 polypeptide to associate with other polypeptides, particularly cognate ligand for HGPRBMY41_{—}3, or its ability to modulate certain cellular signal pathways.

[0455] The HGPRBMY41_{—}3 polypeptide was predicted to comprise four PKC phosphorylation sites using the Motif algorithm (Genetics Computer Group, Inc.). In vivo, protein kinase C exhibits a preference for the phosphorylation of serine or threonine residues. The PKC phosphorylation sites have the following consensus pattern: [ST]-x-[RK], where S or T represents the site of phosphorylation and ‘x’ an intervening amino acid residue. Additional information regarding PKC phosphorylation sites can be found in Woodget J. R., Gould K. L., Hunter T., Eur. J. Biochem. 161:177-184(1986), and Kishimoto A., Nishiyama K., Nakanishi H., Uratsuji Y., Nomura H., Takeyama Y., Nishizuka Y., J. Biol. Chem. 260:12492-12499(1985); which are hereby incorporated by reference herein.

[0456] In preferred embodiments, the following PKC phosphorylation site polypeptides are encompassed by the present invention: MATPRGLGAL (SEQ ID NO:289), MKEGLTQKVNTPF (SEQ ID NO:290), SYGLYTIRDRENR (SEQ ID NO:291), and/or TVSSSTARLDQAH (SEQ ID NO:292). Polynucleotides encoding these polypeptides are also provided. The present invention also encompasses the use of the HGPRBMY41_{—}3 PKC phosphorylation site polypeptides as immunogenic and/or antigenic epitopes as described elsewhere herein.

[0457] The HGPRBMY41_{—}3 polypeptide was predicted to comprise seven casein kinase II phosphorylation sites using the Motif algorithm (Genetics Computer Group, Inc.). Casein kinase II (CK-2) is a protein serine/threonine kinase whose activity is independent of cyclic nucleotides and calcium. CK-2 phosphorylates many different proteins. The substrate specificity [1] of this enzyme can be summarized as follows: (1) Under comparable conditions Ser is favored over Thr.; (2) An acidic residue (either Asp or Glu) must be present three residues from the C-terminal of the phosphate acceptor site; (3) Additional acidic residues in positions +1, +2, +4, and +5 increase the phosphorylation rate. Most physiological substrates have at least one acidic residue in these positions; (4) Asp is preferred to Glu as the provider of acidic determinants; and (5) A basic residue at the N-terminal of the acceptor site decreases the phosphorylation rate, while an acidic one will increase it.

[0458] A consensus pattern for casein kinase II phosphorylations site is as follows: [ST]-x(2)-[DE], wherein ‘x’ represents any amino acid, and S or T is the phosphorylation site.

[0459] Additional information specific to casein kinase II phosphorylation site-II domains may be found in reference to the following publication: Pinna L. A., Biochim. Biophys. Acta 1054:267-284(1990); which is hereby incorporated herein in its entirety.

[0460] In preferred embodiments, the following casein kinase II phosphorylation site polypeptide is encompassed by the present invention: LLLPTSGQEKPTEG (SEQ ID NO:293), TKCRQSGSDSCNVE (SEQ ID NO:294), NLSTNTAEDFYFSL (SEQ ID NO:295), VRLAVTILDIGPGT (SEQ ID NO:296), DVTKGTTGDWSSEG (SEQ ID NO:297), SYGLYTIRDRENRT (SEQ ID NO:298), and/or DRENRTSLELCWFR (SEQ ID NO:299). Polynucleotides encoding these polypeptides are also provided. The present invention also encompasses the use of this casein kinase II phosphorylation site polypeptide as an immunogenic and/or antigenic epitope as described elsewhere herein.

[0461] The HGPRBMY41_{—}3 polypeptide has been shown to comprise four glycosylation sites according to the Motif algorithm (Genetics Computer Group, Inc.). As discussed more specifically herein, protein glycosylation is thought to serve a variety of functions including: augmentation of protein folding, inhibition of protein aggregation, regulation of intracellular trafficking to organelles, increasing resistance to proteolysis, modulation of protein antigenicity, and mediation of intercellular adhesion.

[0462] Asparagine glycosylation sites have the following consensus pattern, N-{P}-[ST]-{P}, wherein N represents the glycosylation site. However, it is well known that that potential N-glycosylation sites are specific to the consensus sequence Asn-Xaa-Ser/Thr. However, the presence of the consensus tripeptide is not sufficient to conclude that an asparagine residue is glycosylated, due to the fact that the folding of the protein plays an important role in the regulation of N-glycosylation. It has been shown that the presence of proline between Asn and Ser/Thr will inhibit N-glycosylation; this has been confirmed by a recent statistical analysis of glycosylation sites, which also shows that about 50% of the sites that have a proline C-terminal to Ser/Thr are not glycosylated. Additional information relating to asparagine glycosylation may be found in reference to the following publications, which are hereby incorporated by reference herein: Marshall R. D., Annu. Rev. Biochem. 41:673-702(1972); Pless D. D., Lennarz W. J., Proc. Natl. Acad. Sci. U.S.A. 74:134-138(1977); Bause E., Biochem. J. 209:331-336(1983); Gavel Y., von Heijne G., Protein Eng. 3:433-442(1990); and Miletich J. P., Broze G. J. Jr., J. Biol. Chem. 265:11397-11404(1990).

[0463] In preferred embodiments, the following asparagine glycosylation site polypeptides are encompassed by the present invention: KALVQNLSTNTAED (SEQ ID NO:300), RSLPGNRSVVRLAV (SEQ ID NO:301), QRPPPNMTLTCVFW (SEQ ID NO:302), and/or IRDRENRTSLELCW (SEQ ID NO:303). Polynucleotides encoding these polypeptides are also provided. The present invention also encompasses the use of these HGPRBMY41_{—}3 asparagine glycosylation site polypeptide as immunogenic and/or antigenic epitopes as described elsewhere herein.

[0464] The HGPRBMY41_{—}3 polypeptide was predicted to comprise ten N-myristoylation sites using the Motif algorithm (Genetics Computer Group, Inc.). An appreciable number of eukaryotic proteins are acylated by the covalent addition of myristate (a C14-saturated fatty acid) to their N-terminal residue via an amide linkage. The sequence specificity of the enzyme responsible for this modification, myristoyl CoA:protein N-myristoyl transferase (NMT), has been derived from the sequence of known N-myristoylated proteins and from studies using synthetic peptides. The specificity seems to be the following: i.) The N-terminal residue must be glycine; ii.) In position 2, uncharged residues are allowed; iii.) Charged residues, proline and large hydrophobic residues are not allowed; iv.) In positions 3 and 4, most, if not all, residues are allowed; v.) In position 5, small uncharged residues are allowed (Ala, Ser, Thr, Cys, Asn and Gly). Serine is favored; and vi.) In position 6, proline is not allowed.

[0465] A consensus pattern for N-myristoylation is as follows: G-{EDRKHPFYW}-x(2)-[STAGCN]-{P}, wherein ‘x’ represents any amino acid, and G is the N-myristoylation site.

[0466] Additional information specific to N-myristoylation sites may be found in reference to the following publication: Towler D. A., Gordon J. I., Adams S. P., Glaser L., Annu. Rev. Biochem. 57:69-99(1988); and Grand R. J. A., Biochem. J. 258:625-638(1989); which is hereby incorporated herein in its entirety.

[0467] In preferred embodiments, the following N-myristoylation site polypeptides are encompassed by the present invention: KCRQSGSDSCNVENLQ (SEQ ID NO:304), KGPRLGLGDGSGVLNN (SEQ ID NO:305), LGDGSGVLNNRLVGLS (SEQ ID NO:306), NNRLVGLSVGQMHVTK (SEQ ID NO:307), EVRPEGTVCCCDHLTF (SEQ ID NO:308), RISQAGCGVSMIFLAF (SEQ ID NO:309), RLMVIGTGSANSYGLY (SEQ ID NO:310), MVIGTGSANSYGLYTI (SEQ ID NO:311), LSSLVGVTWGLAIFTP (SEQ ID NO:312), and/or FNSLQGVFICCWFTIL (SEQ ID NO:313). Polynucleotides encoding these polypeptides are also provided. The present invention also encompasses the use of these N-myristoylation site polypeptides as immunogenic and/or antigenic epitopes as described elsewhere herein.

[0468] Many polynucleotide sequences, such as EST sequences, are publicly available and accessible through sequence databases. Some of these sequences are related to SEQ ID NO:11 and may have been publicly available prior to conception of the present invention. Preferably, such related polynucleotides are specifically excluded from the scope of the present invention. To list every related sequence would be cumbersome. Accordingly, preferably excluded from the present invention are one or more polynucleotides consisting of a nucleotide sequence described by the general formula of a-b, where a is any integer between 1 to 1354 of SEQ ID NO:11, b is an integer between 15 to 1368, where both a and b correspond to the positions of nucleotide residues shown in SEQ ID NO:11, and where b is greater than or equal to a+14

[0469] Features of the Polypeptide Encoded by Gene No:7

[0470] The polypeptide of this gene provided as SEQ ID NO:14 (FIGS. 7A-B), encoded by the polynucleotide sequence according to SEQ ID NO:13 (FIGS. 7A-B), and/or encoded by the polynucleotide contained within the deposited clone, HGPRBMY42 (also referred to as GPCR-148), has significant homology at the nucleotide and amino acid level to a number of G-protein coupled receptors, specifically, the mouse Alpha-1A adrenergic receptor protein (A1AA_MOUSE; SWISS-PROT Accession No: P97718; SEQ ID NO:45); the rat Alpha-1A adrenergic receptor protein (A1AA_RAT; SWISS-PROT Accession No: P43140; SEQ ID NO:46); the human Alpha-1A adrenergic receptor protein (A1AA_HUMAN; SWISS-PROT Accession No: P35348; SEQ ID NO:47); the human alpha adrenergic receptor subtype alpha IC protein (Q9UD63; SWISS-PROT Accession No: Q9UD63; SEQ ID NO:48); the guinea pig Alpha-1A adrenergic receptor protein (A1AA_CAVPO; SWISS-PROT Accession No: Q9WU25; SEQ ID NO:49); the rabbit alpha 1a-adrenoceptor isoform 2 protein (Q9MZU3; SWISS-PROT Accession No: Q9MZU3; SEQ ID NO:50); the bovine Alpha-1A adrenergic receptor protein (A1AA_BOVIN; SWISS-PROT Accession No: P18130; SEQ ID NO:51); the oryla Alpha-1A adrenergic receptor protein (A1AA_ORYLA; SWISS-PROT Accession No: Q91175; SEQ ID NO:52); the amphioxus dopamine DI/beta receptor protein (096716; SWISS-PROT Accession No: 096716; SEQ ID NO:53); the Fugu 5-hydroxytryptamine 1A-alpha receptor protein (5H1A_FUGRU; SWISS-PROT Accession No: O42385; SEQ ID NO:54); and the Human G-protein coupled receptor RE2 protein (O75963; SWISS-PROT Accession No: O75963; SEQ ID NO:55). An alignment of the HGPRBMY42, polypeptide with these proteins is provided in FIGS. 25A-C.

[0471] The determined nucleotide sequence of the HGPRBMY42, cDNA in FIGS. 7A-B (SEQ ID NO:13) contains an open reading frame encoding a protein of about 508 amino acid residues, with a deduced molecular weight of about 56.7 kDa. The amino acid sequence of the predicted HGPRBMY42 polypeptide is shown in FIGS. 7A-B (SEQ ID NO:14). The HGPRBMY42 protein shown in FIGS. 7A-B was determined to share significant identity and similarity to several known G-protein coupled receptors, as shown in FIGS. 25A-C. The percent identity and similarity values between the HGPRBMY42 polypeptide to these known G-protein coupled receptors is provided in FIGS. 30A-B.

[0472] The HGPRBMY42 polypeptide was predicted to comprise seven transmembrane domains (TM1 to TM7) located from about amino acid 37 to about amino acid 56 (TM1; SEQ ID NO:314); from about amino acid 70 to about amino acid 96 (TM2; SEQ ID NO:315); from about amino acid 102 to about amino acid 127 (TM3; SEQ ID NO:316); from about amino acid 148 to about amino acid 170 (TM4; SEQ ID NO:317); from about amino acid 194 to about amino acid 216 (TM5; SEQ ID NO:318); from about amino acid 400 to about amino acid 418 (TM6; SEQ ID NO:319); and/or from about amino acid 434 to about amino acid 453 (TM7; SEQ ID NO:320) of SEQ ID NO:14 (FIGS. 7A-B). In this context, the term “about” may be construed to mean 1, 2, 3, 4, 5, 6, 7, 8, 9, or 10 amino acids beyond the N-Terminus and/or C-terminus of the above referenced transmembrane domain polypeptides.

[0473] In preferred embodiments, the following transmembrane domain polypeptides are encompassed by the present invention: VLVIFLAASFVGNIVLALVL (SEQ ID NO:314), IFNLLVTDLLQISLVAPWVVATSVPLF (SEQ ID NO:315), HFCTALVSLTHLFAFASVNTIVVVSV (SEQ ID NO:316), GYLLLYGTWIVAILQSTPPLYGW (SEQ ID NO:317), ILSVVSFIVIPLIVMIACYSVVF (SEQ ID NO:318), VIFIIIFSYVLSLGPYCFL (SEQ ID NO:319), and/or WVITIIIWLFFLQCCIHPYV (SEQ ID NO:320). Polynucleotides encoding these polypeptides are also provided. The present invention also encompasses the use of these HGPRBMY42 transmembrane domain polypeptides as immunogenic and/or antigenic epitopes as described elsewhere herein.

[0474] The present invention also encompasses the polypeptide sequences that intervene between each of the predicted HGPRBMY42 transmembrane domains. Since these regions are solvent accessible either extracellularly or intracellularly, they are particularly useful for designing antibodies specific to each region. Such antibodies may be useful as antagonists or agonists of the HGPRBMY42 full-length polypeptide and may modulate its activity.

[0475] In preferred embodiments, the following inter-transmembrane domain polypeptides are encompassed by the present invention: QRKPQLLQVTNRF (SEQ ID NO:321), WPLNS (SEQ ID NO:322), DRYLSIIHPLSYPSKMTQRR (SEQ ID NO:323), GQAAFDERNALCSMIWGASPSYT (SEQ ID NO:324), CAARRQHALLYNVKRHSLEVRVKDCVENEDEEGAEKKEEFQDESEFRRQHE GEVKAKEGRMEAKDGSLKAKEGSTGTSES SVEARGSEEVRES STVASDGSME GKEGSTKVEENSMKADKGRTEVNQCSIDLGEDDMEFGEDDINFSEDDVEAV NIPESLPPSRRNSNSNPPLPRCYQCKAAK (SEQ ID NO:325), and/or AVLAVWVDVETQVPQ (SEQ ID NO:326).

[0476] In preferred embodiments, the present invention encompasses the use of N-terminal deletions, C-terminal deletions, or any combination of N-terminal and C-terminal deletions of any one or more of the HGPRBMY42 TM1 thru TM7 transmembrane domain polypeptides as antigenic and/or immunogenic epitopes.

[0477] In preferred embodiments, the present invention also encompasses the use of N-terminal deletions, C-terminal deletions, or any combination of N-terminal and C-terminal deletions of any one or more of the amino acids intervening (i.e., GPCR extracellular or intracellular loops) the HGPRBMY42 TM1 thru TM7 transmembrane domain polypeptides as antigenic and/or immunogenic epitopes.

[0478] The HGPRBMY42 polypeptide was also determined to comprise several conserved cysteines which are denoted by dark shading, in addition to other identical residues, as shown in FIGS. 25A-C. Conservation of cysteines at key amino acid residues is indicative of, conserved structural features, which may correlate with conservation of protein function and/or activity.

[0479] Expression profiling designed to measure the steady state mRNA levels encoding the HGPRBMY42 polypeptide showed predominately high expression levels in brain and/or spinal cord, and to a lesser extent, in other tissues as shown (See FIG. 29).

[0480] The HGPRBMY42 polypeptide is also referred to as Gene 8 (U.S. Ser. No. 10/219,834, filed Aug. 18, 2002; which is hereby incorporated by reference herein in its entirety), in addition to HGPRBMY8 (U.S. Ser. No. 09/992,238, filed Nov. 14, 2001; and which is hereby incorporated by reference herein in its entirety).

[0481] Based upon the strong homology to members of the G-protein coupled receptor proteins, the HGPRBMY42 polypeptide is expected to share at least some biological activity with G-protein coupled receptors, specifically adrenergic receptors, and more preferably with G-protein coupled receptors found within brain and/or spinal cord, in addition to the G-protein coupled receptors referenced elsewhere herein.

[0482] The HGPRBMY42 polynucleotides and polypeptides of the present invention, including agonists and/or fragments thereof, have uses that include detecting, prognosing, treating, preventing, and/or ameliorating the following diseases and/or disorders, neural disorders, metabolic disorders, gastrointestinal disorders, reproductive disorders, Alzheimer's, Parkinson's, diabetes, dwarfism, color blindness, retinal pigmentosa and asthma, depression, schizophrenia, sleeplessness, hypertension, anxiety, stress, renal failure, acute heart failure, hypotension, hypertension, endocrinal diseases, growth disorders, neuropathic pain, obesity, anorexia, HIV infections, cancers, bulimia, asthma, Parkinson's disease, osteoporosis, angina pectoris, myocardial infarction, psychotic, metabolic, cardiovascular and neurological disorders. Also, compounds acting on this receptor can be used as taste modifiers.

[0483] The HGPRBMY42 polynucleotides and polypeptides of the present invention, including agonists and/or fragments thereof, have uses that include modulating signal transduction activity, in various cells, tissues, and organisms, and particularly in mammalian brain and/or spinal cord; preferably human tissue.

[0484] The strong homology to G-protein coupled receptors, particularly adrenergic receptors, combined with the predominate localized expression of HGPRBMY42 in brain and spinal cord suggests the HGPRBMY42 polynucleotides and polypeptides may be useful in treating, diagnosing, prognosing, and/or preventing neurodegenerative disease states, behavioral disorders, or inflammatory conditions. Representative uses are described in the “Regeneration” and “Hyperproliferative Disorders” sections below, in the Examples, and elsewhere herein. Briefly, the uses include, but are not limited to the detection, treatment, and/or prevention of Alzheimer's Disease, Parkinson's Disease, Huntington's Disease, Tourette Syndrome, meningitis, encephalitis, demyelinating diseases, peripheral neuropathies, neoplasia, trauma, congenital malformations, spinal cord injuries, ischemia and infarction, aneurysms, hemorrhages, schizophrenia, mania, dementia, paranoia, obsessive compulsive disorder, depression, panic disorder, learning disabilities, ALS, psychoses, autism, and altered behaviors, including disorders in feeding, sleep patterns, balance, and perception. In addition, elevated expression of this gene product in regions of the brain indicates it plays a role in normal neural function. Potentially, this gene product is involved in synapse formation, neurotransmission, learning, cognition, homeostasis, or neuronal differentiation or survival. Furthermore, the protein may also be used to determine biological activity, to raise antibodies, as tissue markers, to isolate cognate ligands or receptors, to identify agents that modulate their interactions, in addition to its use as a nutritional supplement. Protein, as well as, antibodies directed against the protein may show utility as a tumor marker and/or immunotherapy targets for the above listed tissues.

[0485] The HGPRBMY42 polynucleotides and polypeptides, including fragments and agonists thereof, may have uses which include, either directly or indirectly, for boosting immune responses.

[0486] The HGPRBMY42 polynucleotides and polypeptides, including fragments and /or modulators thereof, may have uses which include identification of modulators of HGPRBMY42 function including antibodies (for detection or neutralization), naturally-occurring modulators and small molecule modulators. Antibodies to domains of the HGPRBMY42 protein could be used as diagnostic agents of cardiovascular and inflammatory conditions in patients, are useful in monitoring the activation of signal transduction pathways, and can be used as a biomarker for the involvement of G-protein couplded receptors in disease states, and in the evaluation of inhibitors of G-protein coupled receptors in vivo.

[0487] HGPRBMY42 polypeptides and polynucleotides have additional uses which include diagnosing diseases related to the over and/or under expression of HGPRBMY42 by identifying mutations in the HGPRBMY42 gene by using HGPRBMY42 sequences as probes or by determining HGPRBMY42 protein or mRNA expression levels. HGPRBMY42 polypeptides may be useful for screening compounds that affect the activity of the protein. HGPRBMY42 peptides can also be used for the generation of specific antibodies and as bait in yeast two hybrid screens to find proteins the specifically interact with HGPRBMY42 (described elsewhere herein).

[0488] Although it is believed the encoded polypeptide may share at least some biological activities with human G-protein coupled receptor proteins (particularly G-protein coupled receptors belonging to the adrenergic receptor family), a number of methods of determining the exact biological function of this clone are either known in the art or are described elsewhere herein. Briefly, the function of this clone may be determined by applying microarray methodology. Nucleic acids corresponding to the HGPRBMY42 polynucleotides, in addition to, other clones of the present invention, may be arrayed on microchips for expression profiling. Depending on which polynucleotide probe is used to hybridize to the slides, a change in expression of a specific gene may provide additional insight into the function of this gene based upon the conditions being studied. For example, an observed increase or decrease in expression levels when the polynucleotide probe used comes from diseased brain tissue, as compared to, normal tissue might indicate a function in modulating brain function, for example. In the case of HGPRBMY42, brain, and/or spinal cord tissue should be used, for example, to extract RNA to prepare the probe.

[0489] In addition, the function of the protein may be assessed by applying quantitative PCR methodology, for example. Real time quantitative PCR would provide the capability of following the expression of the HGPRBMY42 gene throughout development, for example. Quantitative PCR methodology requires only a nominal amount of tissue from each developmentally important step is needed to perform such experiments. Therefore, the application of quantitative PCR methodology to refining the biological function of this polypeptide is encompassed by the present invention. In the case of HGPRBMY42, a disease correlation related to HGPRBMY42 may be made by comparing the mRNA expression level of HGPRBMY42 in normal tissue, as compared to diseased tissue (particularly diseased tissue isolated from the following: brain, and/or spinal cord tissue). Significantly higher or lower levels of HGPRBMY42 expression in the diseased tissue may suggest HGPRBMY42 plays a role in disease progression, and antagonists against HGPRBMY42 polypeptides would be useful therapeutically in treating, preventing, and/or ameliorating the disease. Alternatively, significantly higher or lower levels of HGPRBMY42 expression in the diseased tissue may suggest HGPRBMY42 plays a defensive role against disease progression, and agonists of HGPRBMY42 polypeptides may be useful therapeutically in treating, preventing, and/or ameliorating the disease. Also encompassed by the present invention are quantitative PCR probes corresponding to the polynucleotide sequence provided as SEQ ID NO:13 (FIGS. 7A-B).

[0490] The function of the protein may also be assessed through complementation assays in yeast. For example, in the case of the HGPRBMY42, transforming yeast deficient in adrenergic receptor activity, for example, and assessing their ability to grow would provide convincing evidence the HGPRBMY42 polypeptide has adrenergic receptor activity. Additional assay conditions and methods that may be used in assessing the function of the polynucleotides and polypeptides of the present invention are known in the art, some of which are disclosed elsewhere herein.

[0491] Alternatively, the biological function of the encoded polypeptide may be determined by disrupting a homologue of this polypeptide in Mice and/or rats and observing the resulting phenotype. Such knock-out experiments are known in the art, some of which are disclosed elsewhere herein.

[0492] Moreover, the biological function of this polypeptide may be determined by the application of antisense and/or sense methodology and the resulting generation of transgenic mice and/or rats. Expressing a particular gene in either sense or antisense orientation in a transgenic mouse or rat could lead to respectively higher or lower expression levels of that particular gene. Altering the endogenous expression levels of a gene can lead to the observation of a particular phenotype that can then be used to derive indications on the function of the gene. The gene can be either over-expressed or under expressed in every cell of the organism at all times using a strong ubiquitous promoter, or it could be expressed in one or more discrete parts of the organism using a well characterized tissue-specific promoter (e.g., brain, and/or spinal cord tissue-specific promoter), or it can be expressed at a specified time of development using an inducible and/or a developmentally regulated promoter.

[0493] In the case of HGPRBMY42 transgenic mice or rats, if no phenotype is apparent in normal growth conditions, observing the organism under diseased conditions (neural, neurodegenerative, ambulatory disorders, spinal cord injuries, in addition to cancers, etc.) may lead to understanding the function of the gene. Therefore, the application of antisense and/or sense methodology to the creation of transgenic mice or rats to refine the biological function of the polypeptide is encompassed by the present invention.

[0494] In preferred embodiments, the following N-terminal HGPRBMY42 deletion polypeptides are encompassed by the present invention: M1-P508, T2-P508, S3-P508, T4-P508, C5-P508, T6-P508, N7-P508, S8-P508, T9-P508, R10-P508, E11-P508, S12-P508, N13-P508, S14-P508, S15-P508, H16-P508, T17-P508, C18-P508, M19-P508, P20-P508, L21-P508, S22-P508, K23-P508, M24-P508, P25-P508, I126-P508, S27-P508, L28-P508, A29-P508, H30-P508, G31-P508, I132-P508, I133-P508, R34-P508, S35-P508, T36-P508, V37-P508, L38-P508, V39-P508, I40-P508, F41-P508, L42-P508, A43-P508, A44-P508, S45-P508, F46-P508, V47-P508, G48-P508, N49-P508, I50-P508, V51-P508, L52-P508, A53-P508, L54-P508, V55-P508, L56-P508, Q57-P508, R58-P508, K59-P508, P60-P508, Q61-P508, L62-P508, L63-P508, Q64-P508, V65-P508, T66-P508, N67-P508, R68-P508, F69-P508, 170-P508, F71-P508, N72-P508, L73-P508, L74-P508, V75-P508, T76-P508, D77-P508, L78-P508, L79-P508, Q80-P508, I81-P508, S82-P508, L83-P508, V84-P508, A85-P508, P86-P508, W87-P508, V88-P508, V89-P508, A90-P508, T91-P508, S92-P508, V93-P508, P94-P508, L95-P508, F96-P508, W97-P508, P98-P508, L99-P508, N100-P508, S101-P508, H102-P508, F103-P508, C104-P508, T105-P508, A106-P508, L107-P508, V108-P508, S109-P508, L110-P508, T111-P508, H112-P508, L113-P508, F114-P508, A115-P508, F116-P508, A117-P508, S118-P508, V119-P508, N120-P508, T121-P508, I122-P508, V123-P508, V124-P508, V125-P508, S126-P508, V127-P508, D128-P508, R129-P508, Y130-P508, L131-P508, S132-P508, I133-P508, I134-P508, H135-P508, P136-P508, L137-P508, S138-P508, Y139-P508, P140-P508, S141-P508, K142-P508, M143-P508, T144-P508, Q145-P508, R146-P508, R147-P508, G148-P508, Y149-P508, L150-P508, L151-P508, L152-P508, Y153-P508, G154-P508, T155-P508, W156-P508, I157-P508, V158-P508, A159-P508, I160-P508, L161-P508, Q162-P508, S 163-P508, T164-P508, P165-P508, P166-P508, L167-P508, Y168-P508, G169-P508, W170-P508, G171-P508, Q172-P508, A173-P508, A174-P508, F175-P508, D176-P508, E177-P508, R178-P508, N179-P508, A180-P508, L181-P508, C182-P508, S183-P508, M184-P508, I185-P508, W186-P508, G187-P508, A188-P508, S189-P508, P190-P508, S191-P508, Y192-P508, T193-P508, I194-P508, L195-P508, S196-P508, V197-P508, V198-P508, S199-P508, F200-P508, I201-P508, V202-P508, I203-P508, P204-P508, L205-P508, I206-P508, V207-P508, M208-P508, I209-P508, A210-P508, C211-P508, Y212-P508, S213-P508, V214-P508, V215-P508, F216-P508, C217-P508, A218-P508, A219-P508, R220-P508, R221-P508, Q222-P508, H223-P508, A224-P508, L225-P508, L226-P508, Y227-P508, N228-P508, V229-P508, K230-P508, R231-P508, H232-P508, S233-P508, L234-P508, E235-P508, V236-P508, R237-P508, V238-P508, K239-P508, D240-P508, C241-P508, V242-P508, E243-P508, N244-P508, E245-P508, D246-P508, E247-P508, E248-P508, G249-P508, A250-P508, E251-P508, K252-P508, K253-P508, E254-P508, E255-P508, F256-P508, Q257-P508, D258-P508, E259-P508, S260-P508, E261-P508, F262-P508, R263-P508, R264-P508, Q265-P508, H266-P508, E267-P508, G268-P508, E269-P508, V270-P508, K271-P508, A272-P508, K273-P508, E274-P508, G275-P508, R276-P508, M277-P508, E278-P508, A279-P508, K280-P508, D281-P508, G282-P508, S283-P508, L284-P508, K285-P508, A286-P508, K287-P508, E288-P508, G289-P508, S290-P508, T291-P508, G292-P508, T293-P508, S294-P508, E295-P508, S296-P508, S297-P508, V298-P508, E299-P508, A300-P508, R301-P508, G302-P508, S303-P508, E304-P508, E305-P508, V306-P508, R307-P508, E308-P508, S309-P508, S310-P508, T311-P508, V312-P508, A313-P508, S314-P508, D315-P508, G316-P508, S317-P508, M318-P508, E319-P508, G320-P508, K321-P508, E322-P508, G323-P508, S324-P508, T325-P508, K326-P508, V327-P508, E328-P508, E329-P508, N330-P508, S331-P508, M332-P508, K333-P508, A334-P508, D335-P508, K336-P508, G337-P508, R338-P508, T339-P508, E340-P508, V341-P508, N342-P508, Q343-P508, C344-P508, S345-P508, I346-P508, D347-P508, L348-P508, G349-P508, E350-P508, D351-P508, D352-P508, M353-P508, E354-P508, F355-P508, G356-P508, E357-P508, D358-P508, D359-P508, I360-P508, N361-P508, F362-P508, S363-P508, E364-P508, D365-P508, D366-P508, V367-P508, E368-P508, A369-P508, V370-P508, N371-P508, I372-P508, P373-P508, E374-P508, S375-P508, L376-P508, P377-P508, P378-P508, S379-P508, R380-P508, R381-P508, N382-P508, S383-P508, N384-P508, S385-P508, N386-P508, P387-P508, P388-P508, L389-P508, P390-P508, R391-P508, C392-P508, Y393-P508, Q394-P508, C395-P508, K396-P508, A397-P508, A398-P508, K399-P508, V400-P508, I401-P508, F402-P508, I403-P508, I404-P508, I405-P508, F406-P508, S407-P508, Y408-P508, V409-P508, L410-P508, S411-P508, L412-P508, G413-P508, P414-P508, Y415-P508, C416-P508, F417-P508, L418-P508, A419-P508, V420-P508, L421-P508, A422-P508, V423-P508, W424-P508, V425-P508, D426-P508, V427-P508, E428-P508, T429-P508, Q430-P508, V431-P508, P432-P508, Q433-P508, W434-P508, V435-P508, I436-P508, T437-P508, I438-P508, I439-P508, I440-P508, W441-P508, L442-P508, F443-P508, F444-P508, L445-P508, Q446-P508, C447-P508, C448-P508, I449-P508, H450-P508, P451-P508, Y452-P508, V453-P508, Y454-P508, G455-P508, Y456-P508, M457-P508, H458-P508, K459-P508, T460-P508, I461-P508, K462-P508, K463-P508, E464-P508, I465-P508, Q466-P508, D467-P508, M468-P508, L469-P508, K470-P508, K471-P508, F472-P508, F473-P508, C474-P508, K475-P508, E476-P508, K477-P508, P478-P508, P479-P508, K480-P508, E481-P508, D482-P508, S483-P508, H484-P508, P485-P508, D486-P508, L487-P508, P488-P508, G489-P508, T490-P508, E491-P508, G492-P508, G493-P508, T494-P508, E495-P508, G496-P508, K497-P508, I498-P508, V499-P508, P500-P508, S501-P508, and/or Y502-P508 of SEQ ID NO:14. Polynucleotide sequences encoding these polypeptides are also provided. The present invention also encompasses the use of these N-terminal HGPRBMY42 deletion polypeptides as immunogenic and/or antigenic epitopes as described elsewhere herein.

[0495] In preferred embodiments, the following C-terminal HGPRBMY42 deletion polypeptides are encompassed by the present invention: M1-P508, M1-F507, M1-T506, M1-A505, M1-S504, M1-D503, M1-Y502, M1-S501, M1-P500, M1-V499, M1-I498, M1-K497, M1-G496, M1-E495, M1-T494, M1-G493, M1-G492, M1-E491, M1-T490, M1-G489, M1-P488, M1-L487, M1-D486, M1-P485, M1-H484, M1-S483, M1-D482, M1-E481, M1-K480, M1-P479, M1-P478, M1-K477, M1-E476, M1-K475, M1-C474, M1-F473, M1-F472, M1-K471, M1-K470, M1-L469, M1-M468, M1-D467, M1-Q466, M1-I465, M1-E464, M1-K463, M1-K462, M1-I461, M1-T460, M1-K459, M1-H458, M1-M457, M1-Y456, M1-G455, M1-Y454, M1-V453, M1-Y452, M1-P451, M1-H450, M1-I449, M1-C448, M1-C447, M1-Q446, M1-L445, M1-F444, M1-F443, M1-L442, M1-W441, M1-I440, M1-I439, M1-I438, M1-T437, M1-I436, M1-V435, M1-W434, M1-Q433, M1-P432, M1-V431, M1-Q430, M1-T429, M1-E428, M1-V427, M1-D426, M1-V425, M1-W424, M1-V423, M1-A422, M1-L421, M1-V420, M1-A419, M1-L418, M1-F417, M1-C416, M1-Y415, M1-P414, M1-G413, M1-L412, M1-S411, M1-L410, M1-V409, M1-Y408, M1-S407, M1-F406, M1-I405, M1-I404, M1-I403, M1-F402, M1-I401, M1-V400, M1-K399, M1-A398, M1-A397, M1-K396, M1-C395, M1-Q394, M1-Y393, M1-C392, M1-R391, M1-P390, M1-L389, M1-P388, M1-P387, M1-N386, M1-S385, M1-N384, M1-S383, M1-N382, M1-R381, M1-R380, M1-S379, M1-P378, M1-P377, M1-L376, M1-S375, M1-E374, M1-P373, M1-I372, M1-N371, M1-V370, M1-A369, M1-E368, M1-V367, M1-D366, M1-D365, M1-E364, M1-S363, M1-F362, M1-N361, M1-I360, M1-D359, M1-D358, M1-E357, M1-G356, M1-F355, M1-E354, M1-M353, M1-D352, M1-D351, M1-E350, M1-G349, M1-L348, M1-D347, M1-I346, M1-S345, M1-C344, M1-Q343, M1-N342, M1-V341, M1-E340, M1-T339, M1-R338, M1-G337, M1-K336, M1-D335, M1-A334, M1-K333, M1-M332, M1-S331, M1-N330, M1-E329, M1-E328, M1-V327, M1-K326, M1-T325, M1-S324, M1-G323, M1-E322, M1-K321, M1-G320, M1-E319, M1-M318, M1-S317, M1-G316, M1-D315, M1-S314, M1-A313, M1-V312, M1-T311, M1-S310, M1-S309, M1-E308, M1-R307, M1-V306, M1-E305, M1-E304, M1-S303, M1-G302, M1-R301, M1-A300, M1-E299, M1-V298, M1-S297, M1-S296, M1-E295, M1-S294, M1-T293, M1-G292, M1-T291, M1-S290, M1-G289, M1-E288, M1-K287, M1-A286, M1-K285, M1-L284, M1-S283, M1-G282, M1-D281, M1-K280, M1-A279, M1-E278, M1-M277, M1-R276, M1-G275, M1-E274, M1-K273, M1-A272, M1-K271, M1-V270, M1-E269, M1-G268, M1-E267, M1-H266, M1-Q265, M1-R264, M1-R263, M1-F262, M1-E261, M1-S260, M1-E259, M1-D258, M1-Q257, M1-F256, M1-E255, M1-E254, M1-K253, M1-K252, M1-E251, M1-A250, M1-G249, M1-E248, M1-E247, M1-D246, M1-E245, M1-N244, M1-E243, M1-V242, M1-C241, M1-D240, M1-K239, M1-V238, M1-R237, M1-V236, M1-E235, M1-L234, M1-S233, M1-H232, M1-R231, M1-K230, M1-V229, M1-N228, M1-Y227, M1-L226, M1-L225, M1-A224, M1-H223, M1-Q222, M1-R221, M1-R220, M1-A219, M1-A218, M1-C217, M1-F216, M1-V215, M1-V214, M1-S213, M1-Y212, M1-C211, M1-A210, M1-I209, M1-M208, M1-V207, M1-I206, M1-L205, M1-P204, M1-I203, M1-V202, M1-I201, M1-F200, M1-S199, M1-V198, M1-V197, M1-S196, M1-L195, M1-I194, M1-T193, M1-Y192, M1-S191, M1-P190, M1-S189, M1-A188, M1-G187, M1-W186, M1-I185, M1-M184, M1-S183, M1-C182, M1-L181, M1-A180, M1-N179, M1-R178, M1-E177, M1-D176, M1-F175, M1-A174, M1-A173, M1-Q172, M1-G171, M1-W170, M1-G169, M1-Y168, M1-L167, M1-P166, M1-P165, M1-T164, M1-S163, M1-Q162, M1-L161, M1-I160, M1-A159, M1-V158, M1-I157, M1-W156, M1-T155, M1-G154, M1-Y153, M1-L152, M1-L151, M1-L150, M1-Y149, M1-G148, M1-R147, M1-R146, M1-Q145, M1-T144, M1-M143, M1-K142, M1-S141, M1-P140, M1-Y139, M1-S138, M1-L137, M1-P136, M1-H135, M1-I134, M1-I133, M1-S132, M1-L131, M1-Y130, M1-R129, M1-D128, M1-V127, M1-S126, M1-V125, M1-V124, M1-V123, M1-I122, M1-T121, M1-N120, M1-V119, M1-S118, M1-A117, M1-F116, M1-A115, M1-F114, M1-L113, M1-H112, M1-T111, M1-L110, M1-S109, M1-V108, M1-L107, M1-A106, M1-T105, M1-C104, M1-F103, M1-H102, M1-S101, M1-N100, M1-L99, M1-P98, M1-W97, M1-F96, M1-L95, M1-P94, M1-V93, M1-S92, M1-T91, M1-A90, M1-V89, M1-V88, M1-W87, M1-P86, M1-A85, M1-V84, M1-L83, M1-S82, M1-I81, M1-Q80, M1-L79, M1-L78, M1-D77, M1-T76, M1-V75, M1-L74, M1-L73, M1-N72, M1-F71, M1-I70, M1-F69, M1-R68, M1-N67, M1-T66, M1-V65, M1-Q64, M1-L63, M1-L62, M1-Q61, M1-P60, M1-K59, M1-R58, M1-Q57, M1-L56, M1-V55, M1-L54, M1-A53, M1-L52, M1-V51, M1-I50, M1-N49, M1-G48, M1-V47, M1-F46, M1-S45, M1-A44, M1-A43, M1-L42, M1-F41, M1-I40, M1-V39, M1-L38, M1-V37, M1-T36, M1-S35, M1-R34, M1-I33, M1-I32, M1-G31, M1-H30, M1-A29, M1-L28, M1-S27, M1-I26, M1-P25, M1-M24, M1-K23, M1-S22, M1-L21, M1-P20, M1-M19, M1-C18, M1-T17, M1-H16, M1-S15, M1-S14, M1-N13, M1-S12, M1-E11, M1-R10, M1-T9, M1-S8, and/or M1-N7 of SEQ ID NO:14. Polynucleotide sequences encoding these polypeptides are also provided. The present invention also encompasses the use of these C-terminal HGPRBMY42 deletion polypeptides as immunogenic and/or antigenic epitopes as described elsewhere herein.

[0496] Alternatively, preferred polypeptides of the present invention may comprise polypeptide sequences corresponding to, for example, internal regions of the HGPRBMY42 polypeptide (e.g., any combination of both N- and C-terminal HGPRBMY42 polypeptide deletions) of SEQ ID NO:14. For example, internal regions could be defined by the equation: amino acid NX to amino acid CX, wherein NX refers to any N-terminal deletion polypeptide amino acid of HGPRBMY42 (SEQ ID NO:14), and where CX refers to any C-terminal deletion polypeptide amino acid of HGPRBMY42 (SEQ ID NO:14). Polynucleotides encoding these polypeptides are also provided. The present invention also encompasses the use of these polypeptides as an immunogenic and/or antigenic epitope as described elsewhere herein.

[0497] The present invention also encompasses immunogenic and/or antigenic epitopes of the HGPRBMY42 polypeptide.

[0498] The HGPRBMY42 polypeptides of the present invention were determined to comprise several phosphorylation sites based upon the Motif algorithm (Genetics Computer Group, Inc.). The phosphorylation of such sites may regulate some biological activity of the HGPRBMY42 polypeptide. For example, phosphorylation at specific sites may be involved in regulating the proteins ability to associate or bind to other molecules (e.g., proteins, ligands, substrates, DNA, etc.). In the present case, phosphorylation may modulate the ability of the HGPRBMY42 polypeptide to associate with other polypeptides, particularly cognate ligand for HGPRBMY42, or its ability to modulate certain cellular signal pathways.

[0499] The HGPRBMY42 polypeptide was predicted to comprise eight PKC phosphorylation sites using the Motif algorithm (Genetics Computer Group, Inc.). In vivo, protein kinase C exhibits a preference for the phosphorylation of serine or threonine residues. The PKC phosphorylation sites have the following consensus pattern: [ST]-x-[RK], where S or T represents the site of phosphorylation and ‘x’ an intervening amino acid residue. Additional information regarding PKC phosphorylation sites can be found in Woodget J. R., Gould K. L., Hunter T., Eur. J. Biochem. 161:177-184(1986), and Kishimoto A., Nishiyama K., Nakanishi H., Uratsuji Y., Nomura H., Takeyama Y., Nishizuka Y., J. Biol. Chem. 260:12492-12499(1985); which are hereby incorporated by reference herein.

[0500] In preferred embodiments, the following PKC phosphorylation site polypeptides are encompassed by the present invention: STCTNSTRESNSS (SEQ ID NO:327), QLLQVTNRFIFNL (SEQ ID NO:328), YPSKMTQRRGYLL (SEQ ID NO:329), EAKDGSLKAKEGS (SEQ ID NO:330), EGKEGSTKVEENS (SEQ ID NO:331), KVEENSMKADKGR (SEQ ID NO:332), ESLPPSRRNSNSN (SEQ ID NO:333), and/or GYMHKTIKKEIQD (SEQ ID NO:334). Polynucleotides encoding these polypeptides are also provided. The present invention also encompasses the use of the HGPRBMY42 PKC phosphorylation site polypeptides as immunogenic and/or antigenic epitopes as described elsewhere herein.

[0501] The HGPRBMY42 polypeptide was predicted to comprise five casein kinase II phosphorylation sites using the Motif algorithm (Genetics Computer Group, Inc.). Casein kinase II (CK-2) is a protein serine/threonine kinase whose activity is independent of cyclic nucleotides and calcium. CK-2 phosphorylates many different proteins. The substrate specificity [1] of this enzyme can be summarized as follows: (1) Under comparable conditions Ser is favored over Thr.; (2) An acidic residue (either Asp or Glu) must be present three residues from the C-terminal of the phosphate acceptor site; (3) Additional acidic residues in positions +1, +2, +4, and +5 increase the phosphorylation rate. Most physiological substrates have at least one acidic residue in these positions; (4) Asp is preferred to Glu as the provider of acidic determinants; and (5) A basic residue at the N-terminal of the acceptor site decreases the phosphorylation rate, while an acidic one will increase it.

[0502] A consensus pattern for casein kinase II phosphorylations site is as follows: [ST]-x(2)-[DE], wherein ‘x’ represents any amino acid, and S or T is the phosphorylation site.

[0503] Additional information specific to casein kinase II phosphorylation site-II domains may be found in reference to the following publication: Pinna L. A., Biochim. Biophys. Acta 1054:267-284(1990); which is hereby incorporated herein in its entirety.

[0504] In preferred embodiments, the following casein kinase II phosphorylation site polypeptide is encompassed by the present invention: STCTNSTRESNSSH (SEQ ID NO:335), TGTSESSVEARGSE (SEQ ID NO:336), GKEGSTKVEENSMK (SEQ ID NO:337), DDINFSEDDVEAVN (SEQ ID NO:338), and/or PPKEDSHPDLPGTE (SEQ ID NO:339). Polynucleotides encoding these polypeptides are also provided. The present invention also encompasses the use of this casein kinase II phosphorylation site polypeptide as an immunogenic and/or antigenic epitope as described elsewhere herein.

[0505] The HGPRBMY42 polypeptide was predicted to comprise two cAMP- and cGMP-dependent protein kinase phosphorylation site using the Motif algorithm (Genetics Computer Group, Inc.). There has been a number of studies relative to the specificity of cAMP- and cGMP-dependent protein kinases. Both types of kinases appear to share a preference for the phosphorylation of serine or threonine residues found close to at least two consecutive N-terminal basic residues.

[0506] A consensus pattern for cAMP- and cGMP-dependent protein kinase phosphorylation sites is as follows: [RK](2)-x-[ST], wherein “x” represents any amino acid, and S or T is the phosphorylation site.

[0507] Additional information specific to cAMP- and cGMP-dependent protein kinase phosphorylation sites may be found in reference to the following publication: Fremisco J. R., Glass D. B., Krebs E. G, J. Biol. Chem. 255:4240-4245(1980); Glass D. B., Smith S. B., J. Biol. Chem. 258:14797-14803(1983); and Glass D. B., El-Maghrabi M. R., Pilkis S. J., J. Biol. Chem. 261:2987-2993(1986); which is hereby incorporated herein in its entirety.

[0508] In preferred embodiments, the following cAMP- and cGMP-dependent protein kinase phosphorylation site polypeptide is encompassed by the present invention: LLYNVKRHSLEVRV (SEQ ID NO:340), and/or SLPPSRRNSNSNPP (SEQ ID NO:341). Polynucleotides encoding this polypeptide are also provided. The present invention also encompasses the use of this cAMP- and cGMP-dependent protein kinase phosphorylation site polypeptide as an immunogenic and/or antigenic epitope as described elsewhere herein.

[0509] The HGPRBMY42 polypeptide has been shown to comprise three glycosylation sites according to the Motif algorithm (Genetics Computer Group, Inc.). As discussed more specifically herein, protein glycosylation is thought to serve a variety of functions including: augmentation of protein folding, inhibition of protein aggregation, regulation of intracellular trafficking to organelles, increasing resistance to proteolysis, modulation of protein antigenicity, and mediation of intercellular adhesion.

[0510] Asparagine glycosylation sites have the following consensus pattern, N-{P}-[ST]-{P}, wherein N represents the glycosylation site. However, it is well known that that potential N-glycosylation sites are specific to the consensus sequence Asn-Xaa-Ser/Thr. However, the presence of the consensus tripeptide is not sufficient to conclude that an asparagine residue is glycosylated, due to the fact that the folding of the protein plays an important role in the regulation of N-glycosylation. It has been shown that the presence of proline between Asn and Ser/Thr will inhibit N-glycosylation; this has been confirmed by a recent statistical analysis of glycosylation sites, which also shows that about 50% of the sites that have a proline C-terminal to Ser/Thr are not glycosylated. Additional information relating to asparagine glycosylation may be found in reference to the following publications, which are hereby incorporated by reference herein: Marshall R. D., Annu. Rev. Biochem. 41:673-702(1972); Pless D. D., Lennarz W. J., Proc. Natl. Acad. Sci. U.S.A. 74:134-138(1977); Bause E., Biochem. J. 209:331-336(1983); Gavel Y., von Heijne G., Protein Eng. 3:433-442(1990); and Miletich J. P., Broze G. J. Jr., J. Biol. Chem. 265:11397-11404(1990).

[0511] In preferred embodiments, the following asparagine glycosylation site polypeptides are encompassed by the present invention: TSTCTNSTRESNSS (SEQ ID NO:342), STRESNSSHTCMPL (SEQ ID NO:343), and/or GEDDINFSEDDVEA (SEQ ID NO:344). Polynucleotides encoding these polypeptides are also provided. The present invention also encompasses the use of these HGPRBMY42 asparagine glycosylation site polypeptide as immunogenic and/or antigenic epitopes as described elsewhere herein.

[0512] The HGPRBMY42 polypeptide was predicted to comprise eight N-myristoylation sites using the Motif algorithm (Genetics Computer Group, Inc.). An appreciable number of eukaryotic proteins are acylated by the covalent addition of myristate (a C14-saturated fatty acid) to their N-terminal residue via an amide linkage. The sequence specificity of the enzyme responsible for this modification, myristoyl CoA:protein N-myristoyl transferase (NMT), has been derived from the sequence of known N-myristoylated proteins and from studies using synthetic peptides. The specificity seems to be the following: i.) The N-terminal residue must be glycine; ii.) In position 2, uncharged residues are allowed; iii.) Charged residues, proline and large hydrophobic residues are not allowed; iv.) In positions 3 and 4, most, if not all, residues are allowed; v.) In position 5, small uncharged residues are allowed (Ala, Ser, Thr, Cys, Asn and Gly). Serine is favored; and vi.) In position 6, proline is not allowed.

[0513] A consensus pattern for N-myristoylation is as follows: G-{EDRKHPFYW}-x(2)-[STAGCN]-{P}, wherein ‘x’ represents any amino acid, and G is the N-myristoylation site.

[0514] Additional information specific to N-myristoylation sites may be found in reference to the following publication: Towler D. A., Gordon J. I., Adams S. P., Glaser L., Annu. Rev. Biochem. 57:69-99(1988); and Grand R. J. A., Biochem. J. 258:625-638(1989); which is hereby incorporated herein in its entirety.

[0515] In preferred embodiments, the following N-myristoylation site polypeptides are encompassed by the present invention: ISLAHGIIRSTVLVIF (SEQ ID NO:345), CSMIWGASPSYTILSV (SEQ ID NO:346), MEAKDGSLKAKEGSTG (SEQ ID NO:347), LKAKEGSTGTSESSVE (SEQ ID NO:348), KEGSTGTSESSVEARG (SEQ ID NO:349), TVASDGSMEGKEGSTK (SEQ ID NO:350), HPDLPGTEGGTEGKIV (SEQ ID NO:351), and/or LPGTEGGTEGKIVPSY (SEQ ID NO:352). Polynucleotides encoding these polypeptides are also provided. The present invention also encompasses the use of these N-myristoylation site polypeptides as immunogenic and/or antigenic epitopes as described elsewhere herein.

[0516] Moreover, in confirmation of HGPRBMY42 representing a novel GPCR, the HGPRBMY42 polypeptide was predicted to comprise a G-protein coupled receptor motif using the Motif algorithm (Genetics Computer Group, Inc.). G-protein coupled receptors (also called R7G) are an extensive group of hormones, neurotransmitters, odorants and light receptors which transduce extracellular signals by interaction with guanine nucleotide-binding (G) proteins. Some examples of receptors that belong to this family are provided as follows: 5-hydroxytryptamine (serotonin) 1A to 1F, 2A to 2C, 4, 5A, 5B, 6 and 7, Acetylcholine, muscarinic-type, M1 to M5, Adenosine A1, A2A, A2B and A3, Adrenergic alpha-1A to -1C; alpha-2A to -2D; beta-1 to -3, Angiotensin II types I and II, Bombesin subtypes 3 and 4, Bradykinin B1 and B2, c3a and C5a anaphylatoxin, Cannabinoid CB1 and CB2, Chemokines C-C CC-CKR-1 to CC-CKR-8, Chemokines C-X-C CXC-CKR-1 to CXC-CKR-4, Cholecystokinin-A and cholecystokinin-B/gastrin, Dopamine D1 to D5, Endothelin ET-a and ET-b, fMet-Leu-Phe (fMLP) (N-formyl peptide), Follicle stimulating hormone (FSH-R), Galanin, Gastrin-releasing peptide (GRP-R), Gonadotropin-releasing hormone (GNRH-R), Histamine H1 and H2 (gastric receptor I), Lutropin-choriogonadotropic hormone (LSH-R), Melanocortin MCIR to MC5R, Melatonin, Neuromedin B (NMB-R), Neuromedin K (NK-3R), Neuropeptide Y types 1 to 6, Neurotensin (NT-R), Octopamine (tyramine) from insects, Odorants, Opioids delta-, kappa- and mu-types, Oxytocin (OT-R), Platelet activating factor (PAF-R), Prostacyclin, Prostaglandin D2, Prostaglandin E2, EP1 to EP4 subtypes, Prostaglandin F2, Purinoreceptors (ATP), Somatostatin types 1 to 5, Substance-K (NK-2R), Substance-P (NK-IR), Thrombin, Thromboxane A2, Thyrotropin (TSH-R), Thyrotropin releasing factor (TRH-R), Vasopressin V1a, V1b and V2, Visual pigments (opsins and rhodopsin), Proto-oncogene mas, Caenorhabditis elegans putative receptors C06G4.5, C38C10.1, C43C3.2,T27D1.3 and ZC84.4, Three putative receptors encoded in the genome of cytomegalovirus: US27, US28, and UL33., ECRF3, a putative receptor encoded in the genome of herpesvirus saimiri.

[0517] The structure of all GPCRs are thought to be identical. They have seven hydrophobic regions, each of which most probably spans the membrane. The N-terminus is located on the extracellular side of the membrane and is often glycosylated, while the C-terminus is cytoplasmic and generally phosphorylated. Three extracellular loops alternate with three intracellular loops to link the seven transmembrane regions. Most, but not all of these receptors, lack a signal peptide. The most conserved parts of these proteins are the transmembrane regions and the first two cytoplasmic loops. A conserved acidic-Arg-aromatic triplet is present in the N-terminal extremity of the second cytoplasmic loop and could be implicated in the interaction with G proteins.

[0518] The putative consensus sequence for GPCRs comprises the conserved triplet and also spans the major part of the third transmembrane helix, and is as follows:

[GSTALIVMFYWC]-[GSTANCPDE]-{EDPKRH}-x(2)-[LIVMNQGA]-x(2)-[LIVMFT]-[GSTANC]-[LIVMFYWSTAC]-[DENH]-R-[FYWCSH]-x(2)-[LIVM],

[0519] where “X” represents any amino acid.

[0520] Additional information relating to G-protein coupled receptors may be found in reference to the following publications: Strosberg A. D., Eur. J. Biochem. 196:1-10(1991); Kerlavage A. R., Curr. Opin. Struct. Biol. 1:394-401(1991); Probst W. C., Snyder L. A., Schuster D. I., Brosius J., Sealfon S. C., DNA Cell Biol. 11:1-20(1992); Savarese T. M., Fraser C. M., Biochem. J. 283:1-9(1992); Branchek T., Curr. Biol. 3:315-317(1993); Stiles G. L., J. Biol. Chem. 267:6451-6454(1992); Friell T., Kobilka B. K., Lefkowitz R. J., Caron M. G., Trends Neurosci. 11:321-324(1988); Stevens C. F., Curr. Biol. 1:20-22(1991); Sakurai T., Yanagisawa M., Masaki T., Trends Pharmacol. Sci. 13:103-107(1992); Salesse R., Remy J. J., Levin J. M., Jallal B., Garnier J., Biochimie 73:109-120(1991); Lancet D., Ben-Arie N., Curr. Biol. 3:668-674(1993); Uhl G. R., Childers S., Pasternak G., Trends Neurosci. 17:89-93(1994); Barnard E. A., Burnstock G., Webb T. E., Trends Pharmacol. Sci. 15:67-70(1994); Applebury M. L., Hargrave P. A., Vision Res. 26:1881-1895(1986); Attwood T. K., Eliopoulos E. E., Findlay J. B. C., Gene 98:153-159(1991); http://www.gcrdb.uthscsa.edu/; and http://swift.embl-heidelberg.de/7tm/.

[0521] In preferred embodiments, the following G-protein coupled receptors signature polypeptide is encompassed by the present invention: HLFAFASVNTIVVVSVDRYLSIIHPLS (SEQ ID NO:353). Polynucleotides encoding this polypeptide are also provided. The present invention also encompasses the use of the HGPRBMY42 G-protein coupled receptors signature polypeptide as immunogenic and/or antigenic epitopes as described elsewhere herein.

[0522] Many polynucleotide sequences, such as EST sequences, are publicly available and accessible through sequence databases. Some of these sequences are related to SEQ ID NO:13 and may have been publicly available prior to conception of the present invention. Preferably, such related polynucleotides are specifically excluded from the scope of the present invention. To list every related sequence would be cumbersome. Accordingly, preferably excluded from the present invention are one or more polynucleotides consisting of a nucleotide sequence described by the general formula of a-b, where a is any integer between 1 to 1513 of SEQ ID NO:13, b is an integer between 15 to 1527, where both a and b correspond to the positions of nucleotide residues shown in SEQ ID NO:13, and where b is greater than or equal to a+14

[0523] Features of the Polypeptide Encoded by Gene No:8

[0524] The polypeptide of this gene provided as SEQ ID NO:16 (FIGS. 8A-B), encoded by the polynucleotide sequence according to SEQ ID NO:15 (FIGS. 8A-B), and/or encoded by the polynucleotide contained within the deposited clone, HGPRBMY42_(also referred to as GPCR-148 splice variant 1), has significant homology at the nucleotide and amino acid level to a number of G-protein coupled receptors, specifically, the mouse Alpha-1A adrenergic receptor protein (A1AA_MOUSE; SWISS-PROT Accession No: P97718; SEQ ID NO:45); the rat Alpha-1A adrenergic receptor protein (A1AA_RAT; SWISS-PROT Accession No: P43140; SEQ ID NO:46); the human Alpha-1A adrenergic receptor protein (A1AA_HUMAN; SWISS-PROT Accession No: P35348; SEQ ID NO:47); the human alpha adrenergic receptor subtype alpha 1C protein (Q9UD63; SWISS-PROT Accession No: Q9UD63; SEQ ID NO:48); the guinea pig Alpha-1A adrenergic receptor protein (A1AA_CAVPO; SWISS-PROT Accession No: Q9WU25; SEQ ID NO:49); the rabbit alpha 1a-adrenoceptor isoform 2 protein (Q9MZU3; SWISS-PROT Accession No: Q9MZU3; SEQ ID NO:50); the bovine Alpha-1A adrenergic receptor protein (A1AA_BOVIN; SWISS-PROT Accession No: P18130; SEQ ID NO:51); the oryla Alpha-1A adrenergic receptor protein (A1AA_ORYLA; SWISS-PROT Accession No: Q91175; SEQ ID NO:52); the amphioxus dopamine D1/beta receptor protein (O96716; SWISS-PROT Accession No: O96716; SEQ ID NO:53); the Fugu 5-hydroxytryptamine 1A-alpha receptor protein (5H1A_FUGRU; SWISS-PROT Accession No: O42385; SEQ ID NO:54); and the Human G-protein coupled receptor RE2 protein (O75963; SWISS-PROT Accession No: O75963; SEQ ID NO:55). An alignment of the HGPRBMY42_{—}1, polypeptide with these proteins is provided in FIGS. 25A-C.

[0525] The determined nucleotide sequence of the HGPRBMY42_{—}1, cDNA in FIGS. 8A-B (SEQ ID NO:15) contains an open reading frame encoding a protein of about 398 amino acid residues, with a deduced molecular weight of about 44.8 kDa. The amino acid sequence of the predicted HGPRBMY42_{—}1 polypeptide is shown in FIGS. 8A-B (SEQ ID NO:16). The HGPRBMY42_{—}1 protein shown in FIGS. 8A-B was determined to share significant identity and similarity to several known G-protein coupled receptors, as shown in FIGS. 25A-C. The percent identity and similarity values between the HGPRBMY42_{—}1 polypeptide to these known G-protein coupled receptors is provided in FIGS. 30A-B.

[0526] The HGPRBMY42_{—}1 polynucleotide (SEQ ID NO:15) and polypeptide (SEQ ID NO:16) represents a novel splice variant form of the HGPBMY42 polynucleotide (SEQ ID NO:13) and polypeptide (SEQ ID NO:14) of the present invention.

[0527] The HGPRBMY42_{—}1 polypeptide was predicted to comprise seven transmembrane domains (TM1 to TM7) located from about amino acid 37 to about amino acid 56 (TM1; SEQ ID NO:354); from about amino acid 70 to about amino acid 96 (TM2; SEQ ID NO:355); from about amino acid 102 to about amino acid 127 (TM3; SEQ ID NO:356); from about amino acid 148 to about amino acid 170 (TM4; SEQ ID NO:357); from about amino acid 194 to about amino acid 216 (TM5; SEQ ID NO:358); from about amino acid 290 to about amino acid 308 (TM6; SEQ ID NO:359); and/or from about amino acid 324 to about amino acid 343 (TM7; SEQ ID NO:360) of SEQ ID NO:16 (FIGS. 8A-B). In this context, the term “about” may be construed to mean 1, 2, 3, 4, 5, 6, 7, 8, 9, or 10 amino acids beyond the N-Terminus and/or C-terminus of the above referenced transmembrane domain polypeptides.

[0528] In preferred embodiments, the following transmembrane domain polypeptides are encompassed by the present invention: VLVIFLAASFVGNIVLALVL (SEQ ID NO:314), IFNLLVTDLLQISLVAPWVVATSVPLF (SEQ ID NO:315), HFCTALVSLTHLFAFASVNTIVVVSV (SEQ ID NO:316), GYLLLYGTWIVAILQSTPPLYGW (SEQ ID NO:317), ILSVVSFIVIPLIVMIACYSVVF (SEQ ID NO:318), VIFIIIFSYVLSLGPYCFL (SEQ ID NO:319), and/or WVITIIIWLFFLQCCIHPYV (SEQ ID NO:320). Polynucleotides encoding these polypeptides are also provided. The present invention also encompasses the use of these HGPRBMY42_{—}1 transmembrane domain polypeptides as immunogenic and/or antigenic epitopes as described elsewhere herein.

[0529] The present invention also encompasses the polypeptide sequences that intervene between each of the predicted HGPRBMY42_{—}1 transmembrane domains. Since these regions are solvent accessible either extracellularly or intracellularly, they are particularly useful for designing antibodies specific to each region. Such antibodies may be useful as antagonists or agonists of the HGPRBMY42_{—}1 full-length polypeptide and may modulate its activity.

[0530] In preferred embodiments, the following inter-transmembrane domain polypeptides are encompassed by the present invention: QRKPQLLQVTNRF (SEQ ID NO:361), WPLNS (SEQ ID NO:362), DRYLSIIHPLSYPSKMTQRR (SEQ ID NO:363), GQAAFDERNALCSMIWGASPSYT (SEQ ID NO:364), CAARRQHALLYNVKRHSLEVRVKDCVENEDEEGAEKKEEFQDEMNIPESLPP SRRNSNSNPPLPRCYQCKAAK (SEQ ID NO:365), and/or AVLAVWVDVETQVPQ (SEQ ID NO:366).

[0531] In preferred embodiments, the present invention encompasses the use of N-terminal deletions, C-terminal deletions, or any combination of N-terminal and C-terminal deletions of any one or more of the HGPRBMY42_{—}1 TM1 thru TM7 transmembrane domain polypeptides as antigenic and/or immunogenic epitopes.

[0532] In preferred embodiments, the present invention also encompasses the use of N-terminal deletions, C-terminal deletions, or any combination of N-terminal and C-terminal deletions of any one or more of the amino acids intervening (i.e., GPCR extracellular or intracellular loops) the HGPRBMY42_{—}1 TM1 thru TM7 transmembrane domain polypeptides as antigenic and/or immunogenic epitopes.

[0533] The HGPRBMY42_{—}1 polypeptide was also determined to comprise several conserved cysteines which are denoted by dark shading, in addition to other identical residues, as shown in FIGS. 25A-C. Conservation of cysteines at key amino acid residues is indicative of conserved structural features, which may correlate with conservation of protein function and/or activity.

[0534] Expression profiling designed to measure the steady state mRNA levels encoding the HGPRBMY42 polypeptide showed predominately high expression levels in brain and/or spinal cord, and to a lesser extent, in other tissues as shown (See FIG. 29). The expression profile of the HGPRBMY42_{—}1 splice variant is expected to be the same or similar to the HGPRBMY42 expression profile.

[0535] Based upon the strong homology to members of the G-protein coupled receptor proteins, the HGPRBMY42_{—}1 polypeptide is expected to share at least some biological activity with G-protein coupled receptors, specifically adrenergic receptors, and more preferably with G-protein coupled receptors found within brain and/or spinal cord, in addition to the G-protein coupled receptors referenced elsewhere herein.

[0536] The HGPRBMY42_{—}1 polynucleotides and polypeptides of the present invention, including agonists and/or fragments thereof, have uses that include detecting, prognosing, treating, preventing, and/or ameliorating the following diseases and/or disorders, neural disorders, metabolic disorders, gastrointestinal disorders, reproductive disorders, Alzheimer's, Parkinson's, diabetes, dwarfism, color blindness, retinal pigmentosa and asthma, depression, schizophrenia, sleeplessness, hypertension, anxiety, stress, renal failure, acute heart failure, hypotension, hypertension, endocrinal diseases, growth disorders, neuropathic pain, obesity, anorexia, HIV infections, cancers, bulimia, asthma, Parkinson's disease, osteoporosis, angina pectoris, myocardial infarction, psychotic, metabolic, cardiovascular and neurological disorders. Also, compounds acting on this receptor can be used as taste modifiers.

[0537] The HGPRBMY42_{—}1 polynucleotides and polypeptides of the present invention, including agonists and/or fragments thereof, have uses that include modulating signal transduction activity, in various cells, tissues, and organisms, and particularly in mammalian brain and/or spinal cord; preferably human tissue.

[0538] The strong homology to G-protein coupled receptors, particularly adrenergic receptors, combined with the predominate localized expression of HGPRBMY42 in brain and spinal cord suggests the HGPRBMY42_{—}1 polynucleotides and polypeptides may be useful in treating, diagnosing, prognosing, and/or preventing neurodegenerative disease states, behavioral disorders, or inflammatory conditions. Representative uses are described in the “Regeneration” and “Hyperproliferative Disorders” sections below, in the Examples, and elsewhere herein. Briefly, the uses include, but are not limited to the detection, treatment, and/or prevention of Alzheimer's Disease, Parkinson's Disease, Huntington's Disease, Tourette Syndrome, meningitis, encephalitis, demyelinating diseases, peripheral neuropathies, neoplasia, trauma, congenital malformations, spinal cord injuries, ischemia and infarction, aneurysms, hemorrhages, schizophrenia, mania, dementia, paranoia, obsessive compulsive disorder, depression, panic disorder, learning disabilities, ALS, psychoses, autism, and altered behaviors, including disorders in feeding, sleep patterns, balance, and perception. In addition, elevated expression of this gene product in regions of the brain indicates it plays a role in normal neural function. Potentially, this gene product is involved in synapse formation, neurotransmission, learning, cognition, homeostasis, or neuronal differentiation or survival. Furthermore, the protein may also be used to determine biological activity, to raise antibodies, as tissue markers, to isolate cognate ligands or receptors, to identify agents that modulate their interactions, in addition to its use as a nutritional supplement. Protein, as well as, antibodies directed against the protein may show utility as a tumor marker and/or immunotherapy targets for the above listed tissues.

[0539] The HGPRBMY42_{—}1 polynucleotides and polypeptides, including fragments and agonists thereof, may have uses which include, either directly or indirectly, for boosting immune responses.

[0540] The HGPRBMY42_{—}1 polynucleotides and polypeptides, including fragments and/or modulators thereof, may have uses which include identification of modulators of HGPRBMY42_{—}1 function including antibodies (for detection or neutralization), naturally-occurring modulators and small molecule modulators. Antibodies to domains of the HGPRBMY42_{—}1 protein could be used as diagnostic agents of cardiovascular and inflammatory conditions in patients, are useful in monitoring the activation of signal transduction pathways, and can be used as a biomarker for the involvement of G-protein couplded receptors in disease states, and in the evaluation of inhibitors of G-protein coupled receptors in vivo.

[0541] HGPRBMY42_{—}1 polypeptides and polynucleotides have additional uses which include diagnosing diseases related to the over and/or under expression of HGPRBMY42_{—}1 by identifying mutations in the HGPRBMY42_{—}1 gene by using HGPRBMY42_{—}1 sequences as probes or by determining HGPRBMY42_{—}1 protein or mRNA expression levels. HGPRBMY42_{—}1 polypeptides may be useful for screening compounds that affect the activity of the protein. HGPRBMY42_{—}1 peptides can also be used for the generation of specific antibodies and as bait in yeast two hybrid screens to find proteins the specifically interact with HGPRBMY42_{—}1 (described elsewhere herein).

[0542] Although it is believed the encoded polypeptide may share at least some biological activities with human G-protein coupled receptor proteins (particularly G-protein coupled receptors belonging to the adrenergic receptor family), a number of methods of determining the exact biological function of this clone are either known in the art or are described elsewhere herein. Briefly, the function of this clone may be determined by applying microarray methodology. Nucleic acids corresponding to the HGPRBMY42_{—}1 polynucleotides, in addition to, other clones of the present invention, may be arrayed on microchips for expression profiling. Depending on which polynucleotide probe is used to hybridize to the slides, a change in expression of a specific gene may provide additional insight into the function of this gene based upon the conditions being studied. For example, an observed increase or decrease in expression levels when the polynucleotide probe used comes from diseased brain tissue, as compared to, normal tissue might indicate a function in modulating brain function, for example. In the case of HGPRBMY42_{—}1, brain, and/or spinal cord tissue should be used, for example, to extract RNA to prepare the probe.

[0543] In addition, the function of the protein may be assessed by applying quantitative PCR methodology, for example. Real time quantitative PCR would provide the capability of following the expression of the HGPRBMY42_{—}1 gene throughout development, for example. Quantitative PCR methodology requires only a nominal amount of tissue from each developmentally important step is needed to perform such experiments. Therefore, the application of quantitative PCR methodology to refining the biological function of this polypeptide is encompassed by the present invention. In the case of HGPRBMY42_{—}1, a disease correlation related to HGPRBMY42_{—}1 may be made by comparing the mRNA expression level of HGPRBMY42_{—}1 in normal tissue, as compared to diseased tissue (particularly diseased tissue isolated from the following: brain, and/or spinal cord tissue). Significantly higher or lower levels of HGPRBMY42_{—}1 expression in the diseased tissue may suggest HGPRBMY42_{—}1 plays a role in disease progression, and antagonists against HGPRBMY42_{—}1 polypeptides would be useful therapeutically in treating, preventing, and/or ameliorating the disease. Alternatively, significantly higher or lower levels of HGPRBMY42_{—}1 expression in the diseased tissue may suggest HGPRBMY42_{—}1 plays a defensive role against disease progression, and agonists of HGPRBMY42_{—}1 polypeptides may be useful therapeutically in treating, preventing, and/or ameliorating the disease. Also encompassed by the present invention are quantitative PCR probes corresponding to the polynucleotide sequence provided as SEQ ID NO:15 (FIGS. 8A-B).

[0544] The function of the protein may also be assessed through complementation assays in yeast. For example, in the case of the HGPRBMY42_{—}1, transforming yeast deficient in adrenergic receptor activity, for example, and assessing their ability to grow would provide convincing evidence the HGPRBMY42_{—}1 polypeptide has adrenergic receptor activity. Additional assay conditions and methods that may be used in assessing the function of the polynucleotides and polypeptides of the present invention are known in the art, some of which are disclosed elsewhere herein.

[0545] Alternatively, the biological function of the encoded polypeptide may be determined by disrupting a homologue of this polypeptide in Mice and/or rats and observing the resulting phenotype. Such knock-out experiments are known in the art, some of which are disclosed elsewhere herein.

[0546] Moreover, the biological function of this polypeptide may be determined by the application of antisense and/or sense methodology and the resulting generation of transgenic mice and/or rats. Expressing a particular gene in either sense or antisense orientation in a transgenic mouse or rat could lead to respectively higher or lower expression levels of that particular gene. Altering the endogenous expression levels of a gene can lead to the observation of a particular phenotype that can then be used to derive indications on the function of the gene. The gene can be either over-expressed or under expressed in every cell of the organism at all times using a strong ubiquitous promoter, or it could be expressed in one or more discrete parts of the organism using a well characterized tissue-specific promoter (e.g., brain, and/or spinal cord tissue-specific promoter), or it can be expressed at a specified time of development using an inducible and/or a developmentally regulated promoter.

[0547] In the case of HGPRBMY42_{—}1 transgenic mice or rats, if no phenotype is apparent in normal growth conditions, observing the organism under diseased conditions (neural, neurodegenerative, ambulatory disorders, spinal cord injuries, in addition to cancers, etc.) may lead to understanding the function of the gene. Therefore, the application of antisense and/or sense methodology to the creation of transgenic mice or rats to refine the biological function of the polypeptide is encompassed by the present invention.

[0548] In preferred embodiments, the following N-terminal HGPRBMY42_{—}1 deletion polypeptides are encompassed by the present invention: M1-P398, T2-P398, S3-P398, T4-P398, C5-P398, T6-P398, N7-P398, S8-P398, T9-P398, R10-P398, E11-P398, S12-P398, N13-P398, S14-P398, S15-P398, H16-P398, T17-P398, C18-P398, M19-P398, P20-P398, L21-P398, S22-P398, K23-P398, M24-P398, P25-P398, I26-P398, S27-P398, L28-P398, A29-P398, H30-P398, G31-P398, I32-P398, I33-P398, R34-P398, S35-P398, T36-P398, V37-P398, L38-P398, V39-P398, I40-P398, F41-P398, L42-P398, A43-P398, A44-P398, S45-P398, F46-P398, V47-P398, G48-P398, N49-P398, I50-P398, V51-P398, L52-P398, A53-P398, L54-P398, V55-P398, L56-P398, Q57-P398, R58-P398, K59-P398, P60-P398, Q61-P398, L62-P398, L63-P398, Q64-P398, V65-P398, T66-P398, N67-P398, R68-P398, F69-P398, I70-P398, F71-P398, N72-P398, L73-P398, L74-P398, V75-P398, T76-P398, D77-P398, L78-P398, L79-P398, Q80-P398, I81-P398, S82-P398, L83-P398, V84-P398, A85-P398, P86-P398, W87-P398, V88-P398, V89-P398, A90-P398, T91-P398, S92-P398, V93-P398, P94-P398, L95-P398, F96-P398, W97-P398, P98-P398, L99-P398, N100-P398, S101-P398, H102-P398, F103-P398, C104-P398, T105-P398, A106-P398, L107-P398, V108-P398, S109-P398, L110-P398, T111-P398, H112-P398, L113-P398, F114-P398, A115-P398, F116-P398, A117-P398, S118-P398, V119-P398, N120-P398, T121-P398, I122-P398, V123-P398, V124-P398, V125-P398, S126-P398, V127-P398, D128-P398, R129-P398, Y130-P398, L131-P398, S132-P398, I133-P398, I134-P398, H135-P398, P136-P398, L137-P398, S138-P398, Y139-P398, P140-P398, S141-P398, K142-P398, M143-P398, T144-P398, Q145-P398, R146-P398, R147-P398, G148-P398, Y149-P398, L150-P398, L151-P398, L152-P398, Y153-P398, G154-P398, T155-P398, W156-P398, I157-P398, V158-P398, A159-P398, I160-P398, L161-P398, Q162-P398, S163-P398, T164-P398, P165-P398, P166-P398, L167-P398, Y168-P398, G169-P398, W170-P398, G171-P398, Q172-P398, A173-P398, A174-P398, F175-P398, D176-P398, E177-P398, R178-P398, N179-P398, A180-P398, L181-P398, C182-P398, S183-P398, M184-P398, I185-P398, W186-P398, G187-P398, A188-P398, S189-P398, P190-P398, S191-P398, Y192-P398, T193-P398, I194-P398, L195-P398, S196-P398, V197-P398, V198-P398, S199-P398, F200-P398, I201-P398, V202-P398, I203-P398, P204-P398, L205-P398, I206-P398, V207-P398, M208-P398, I209-P398, A210-P398, C211-P398, Y212-P398, S213-P398, V214-P398, V215-P398, F216-P398, C217-P398, A218-P398, A219-P398, R220-P398, R221-P398, Q222-P398, H223-P398, A224-P398, L225-P398, L226-P398, Y227-P398, N228-P398, V229-P398, K230-P398, R231-P398, H232-P398, S233-P398, L234-P398, E235-P398, V236-P398, R237-P398, V238-P398, K239-P398, D240-P398, C241-P398, V242-P398, E243-P398, N244-P398, E245-P398, D246-P398, E247-P398, E248-P398, G249-P398, A250-P398, E251-P398, K252-P398, K253-P398, E254-P398, E255-P398, F256-P398, Q257-P398, D258-P398, E259-P398, M260-P398, and/or N261-P398 of SEQ ID NO:16. Polynucleotide sequences encoding these polypeptides are also provided. The present invention also encompasses the use of these N-terminal HGPRBMY42_{—}1 deletion polypeptides as immunogenic and/or antigenic epitopes as described elsewhere herein.

[0549] In preferred embodiments, the following C-terminal HGPRBMY42_{—}1 deletion polypeptides are encompassed by the present invention: M1-P398, M1-F397, M1-T396, M1-A395, M1-S394, M1-D393, M1-Y392, M1-S391, M1-P390, M1-V389, M1-I388, M1-K387, M1-G386, M1-E385, M1-T384, M1-G383, M1-G382, M1-E381, M1-T380, M1-G379, M1-P378, M1-L377, M1-D376, M1-P375, M1-H374, M1-S373, M1-D372, M1-E371, M1-K370, M1-P369, M1-P368, M1-K367, M1-E366, M1-K365, M1-C364, M1-F363, M1-F362, M1-K361, M1-K360, M1-L359, M1-M358, M1-D357, M1-Q356, M1-I355, M1-E354, M1-K353, M1-K352, M1-I351, M1-T350, M1-K349, M1-H348, M1-M347, M1-Y346, M1-G345, M1-Y344, M1-V343, M1-Y342, M1-P341, M1-H340, M1-I339, M1-C338, M1-C337, M1-Q336, M1-L335, M1-F334, M1-F333, M1-L332, M1-W331, M1-I330, M1-I329, M1-I328, M1-T327, M1-I326, M1-V325, M1-W324, M1-Q323, M1-P322, M1-V321, M1-Q320, M1-T319, M1-E318, M1-V317, M1-D316, M1-V315, M1-W314, M1-V313, M1-A312, M1-L311, M1-V310, M1-A309, M1-L308, M1-F307, M1-C306, M1-Y305, M1-P304, M1-G303, M1-L302, M1-S301, M1-L300, M1-V299, M1-Y298, M1-S297, M1-F296, M1-I295, M1-I294, M1-I293, M1-F292, M1-I291, M1-V290, M1-K289, M1-A288, M1-A287, M1-K286, M1-C285, M1-Q284, M1-Y283, M1-C282, M1-R281, M1-P280, M1-L279, M1-P278, M1-P277, M1-N276, M1-S275, M1-N274, M1-S273, M1-N272, M1-R271, M1-R270, M1-S269, M1-P268, M1-P267, M1-L266, M1-S265, M1-E264, M1-P263, M1-I262, M1-N261, M1-M260, M1-E259, M1-D258, M1-Q257, M1-F256, and/or M1-E255 of SEQ ID NO:16. Polynucleotide sequences encoding these polypeptides are also provided. The present invention also encompasses the use of these C-terminal HGPRBMY42_{—}1 deletion polypeptides as immunogenic and/or antigenic epitopes as described elsewhere herein.

[0550] Alternatively, preferred polypeptides of the present invention may comprise polypeptide sequences corresponding to, for example, internal regions of the HGPRBMY42_{—}1 polypeptide (e.g., any combination of both N- and C-terminal HGPRBMY42_{—}1 polypeptide deletions) of SEQ ID NO:16. For example, internal regions could be defined by the equation: amino acid NX to amino acid CX, wherein NX refers to any N-terminal deletion polypeptide amino acid of HGPRBMY42_{—}1 (SEQ ID NO:16), and where CX refers to any C-terminal deletion polypeptide amino acid of HGPRBMY42_{—}1 (SEQ ID NO:16). Polynucleotides encoding these polypeptides are also provided. The present invention also encompasses the use of these polypeptides as an immunogenic and/or antigenic epitope as described elsewhere herein.

[0551] The present invention also encompasses immunogenic and/or antigenic epitopes of the HGPRBMY42_{—}1 polypeptide.

[0552] The HGPRBMY42_{—}1 polypeptides of the present invention were determined to comprise several phosphorylation sites based upon the Motif algorithm (Genetics Computer Group, Inc.). The phosphorylation of such sites may regulate some biological activity of the HGPRBMY42_{—}1 polypeptide. For example, phosphorylation at specific sites may be involved in regulating the proteins ability to associate or bind to other molecules (e.g., proteins, ligands, substrates, DNA, etc.). In the present case, phosphorylation may modulate the ability of the HGPRBMY42_{—}1 polypeptide to associate with other polypeptides, particularly cognate ligand for HGPRBMY42_{—}1, or its ability to modulate certain cellular signal pathways.

[0553] The HGPRBMY42_{—}1 polypeptide was predicted to comprise five PKC phosphorylation sites using the Motif algorithm (Genetics Computer Group, Inc.). In vivo, protein kinase C exhibits a preference for the phosphorylation of serine or threonine residues. The PKC phosphorylation sites have the following consensus pattern: [ST]-x-[RK], where S or T represents the site of phosphorylation and ‘x’ an intervening amino acid residue. Additional information regarding PKC phosphorylation sites can be found in Woodget J. R., Gould K. L., Hunter T., Eur. J. Biochem. 161:177-184(1986), and Kishimoto A., Nishiyama K., Nakanishi H., Uratsuji Y., Nomura H., Takeyama Y., Nishizuka Y., J. Biol. Chem. 260:12492-12499(1985); which are hereby incorporated by reference herein.

[0554] In preferred embodiments, the following PKC phosphorylation site polypeptides are encompassed by the present invention: STCTNSTRESNSS (SEQ ID NO:367), QLLQVTNRFIFNL (SEQ ID NO:368), YPSKMTQRRGYLL (SEQ ID NO:369), ESLPPSRRNSNSN (SEQ ID NO:370), and/or GYMHKTIKKEIQD (SEQ ID NO:371). Polynucleotides encoding these polypeptides are also provided. The present invention also encompasses the use of the HGPRBMY42_{—}1 PKC phosphorylation site polypeptides as immunogenic and/or antigenic epitopes as described elsewhere herein.

[0555] The HGPRBMY42_{—}1 polypeptide was predicted to comprise two casein kinase II phosphorylation sites using the Motif algorithm (Genetics Computer Group, Inc.). Casein kinase II (CK-2) is a protein serine/threonine kinase whose activity is independent of cyclic nucleotides and calcium. CK-2 phosphorylates many different proteins. The substrate specificity [1] of this enzyme can be summarized as follows: (1) Under comparable conditions Ser is favored over Thr.; (2) An acidic residue (either Asp or Glu) must be present three residues from the C-terminal of the phosphate acceptor site; (3) Additional acidic residues in positions +1, +2, +4, and +5 increase the phosphorylation rate. Most physiological substrates have at least one acidic residue in these positions; (4) Asp is preferred to Glu as the provider of acidic determinants; and (5) A basic residue at the N-terminal of the acceptor site decreases the phosphorylation rate, while an acidic one will increase it.

[0556] A consensus pattern for casein kinase II phosphorylations site is as follows: [ST]-x(2)-[DE], wherein ‘x’ represents any amino acid, and S or T is the phosphorylation site.

[0557] Additional information specific to casein kinase II phosphorylation site-II domains may be found in reference to the following publication: Pinna L. A., Biochim. Biophys. Acta 1054:267-284(1990); which is hereby incorporated herein in its entirety.

[0558] In preferred embodiments, the following casein kinase II phosphorylation site polypeptide is encompassed by the present invention: STCTNSTRESNSSH (SEQ ID NO:372), and/or PPKEDSHPDLPGTE (SEQ ID NO:373). Polynucleotides encoding these polypeptides are also provided. The present invention also encompasses the use of this casein kinase II phosphorylation site polypeptide as an immunogenic and/or antigenic epitope as described elsewhere herein.

[0559] The HGPRBMY42_{—}1 polypeptide was predicted to comprise two cAMP- and cGMP-dependent protein kinase phosphorylation site using the Motif algorithm (Genetics Computer Group, Inc.). There has been a number of studies relative to the specificity of cAMP- and cGMP-dependent protein kinases. Both types of kinases appear to share a preference for the phosphorylation of serine or threonine residues found close to at least two consecutive N-terminal basic residues.

[0560] A consensus pattern for cAMP- and cGMP-dependent protein kinase phosphorylation sites is as follows: [RK](2)-x-[ST], wherein “x” represents any amino acid, and S or T is the phosphorylation site.

[0561] Additional information specific to cAMP- and cGMP-dependent protein kinase phosphorylation sites may be found in reference to the following publication: Fremisco J. R., Glass D. B., Krebs E. G, J. Biol. Chem. 255:4240-4245(1980); Glass D. B., Smith S. B., J. Biol. Chem. 258:14797-14803(1983); and Glass D. B., El-Maghrabi M. R., Pilkis S. J., J. Biol. Chem. 261:2987-2993(1986); which is hereby incorporated herein in its entirety.

[0562] In preferred embodiments, the following cAMP- and cGMP-dependent protein kinase phosphorylation site polypeptide is encompassed by the present invention: LLYNVKRHSLEVRV (SEQ ID NO:374), and/or SLPPSRRNSNSNPP (SEQ ID NO:375). Polynucleotides encoding this polypeptide are also provided. The present invention also encompasses the use of this cAMP- and cGMP-dependent protein kinase phosphorylation site polypeptide as an immunogenic and/or antigenic epitope as described elsewhere herein.

[0563] The HGPRBMY42_{—}1 polypeptide has been shown to comprise two glycosylation sites according to the Motif algorithm (Genetics Computer Group, Inc.). As discussed more specifically herein, protein glycosylation is thought to serve a variety of functions including: augmentation of protein folding, inhibition of protein aggregation, regulation of intracellular trafficking to organelles, increasing resistance to proteolysis, modulation of protein antigenicity, and mediation of intercellular adhesion.

[0564] Asparagine glycosylation sites have the following consensus pattern, N-{P}-[ST]-{P}, wherein N represents the glycosylation site. However, it is well known that that potential N-glycosylation sites are specific to the consensus sequence Asn-Xaa-Ser/Thr. However, the presence of the consensus tripeptide is not sufficient to conclude that an asparagine residue is glycosylated, due to the fact that the folding of the protein plays an important role in the regulation of N-glycosylation. It has been shown that the presence of proline between Asn and Ser/Thr will inhibit N-glycosylation; this has been confirmed by a recent statistical analysis of glycosylation sites, which also shows that about 50% of the sites that have a proline C-terminal to Ser/Thr are not glycosylated. Additional information relating to asparagine glycosylation may be found in reference to the following publications, which are hereby incorporated by reference herein: Marshall R. D., Annu. Rev. Biochem. 41:673-702(1972); Pless D. D., Lennarz W. J., Proc. Natl. Acad. Sci. U.S.A. 74:134-138(1977); Bause E., Biochem. J. 209:331-336(1983); Gavel Y., von Heijne G., Protein Eng. 3:433-442(1990); and Miletich J. P., Broze G. J. Jr., J. Biol. Chem. 265:11397-11404(1990).

[0565] In preferred embodiments, the following asparagine glycosylation site polypeptides are encompassed by the present invention: TSTCTNSTRESNSS (SEQ ID NO:376), and/or STRESNSSHTCMPL (SEQ ID NO:377). Polynucleotides encoding these polypeptides are also provided. The present invention also encompasses the use of these HGPRBMY42_{—}1 asparagine glycosylation site polypeptide as immunogenic and/or antigenic epitopes as described elsewhere herein.

[0566] The HGPRBMY42_{—}1 polypeptide was predicted to comprise eight N-myristoylation sites using the Motif algorithm (Genetics Computer Group, Inc.). An appreciable number of eukaryotic proteins are acylated by the covalent addition of myristate (a C14-saturated fatty acid) to their N-terminal residue via an amide linkage. The sequence specificity of the enzyme responsible for this modification, myristoyl CoA:protein N-myristoyl transferase (NMT), has been derived from the sequence of known N-myristoylated proteins and from studies using synthetic peptides. The specificity seems to be the following: i.) The N-terminal residue must be glycine; ii.) In position 2, uncharged residues are allowed; iii.) Charged residues, proline and large hydrophobic residues are not allowed; iv.) In positions 3 and 4, most, if not all, residues are allowed; v.) In position 5, small uncharged residues are allowed (Ala, Ser, Thr, Cys, Asn and Gly). Serine is favored; and vi.) In position 6, proline is not allowed.

[0567] A consensus pattern for N-myristoylation is as follows: G-{EDRKHPFYW}-x(2)-[STAGCN]-{P}, wherein ‘x’ represents any amino acid, and G is the N-myristoylation site.

[0568] Additional information specific to N-myristoylation sites may be found in reference to the following publication: Towler D. A., Gordon J. I., Adams S. P., Glaser L., Annu. Rev. Biochem. 57:69-99(1988); and Grand R. J. A., Biochem. J. 258:625-638(1989); which is hereby incorporated herein in its entirety.

[0569] In preferred embodiments, the following N-myristoylation site polypeptides are encompassed by the present invention: ISLAHGIIRSTVLVIF (SEQ ID NO:378), CSMIWGASPSYTILSV (SEQ ID NO:379), HPDLPGTEGGTEGKIV (SEQ ID NO:380), and/or LPGTEGGTEGKIVPSY (SEQ ID NO:381). Polynucleotides encoding these polypeptides are also provided. The present invention also encompasses the use of these N-myristoylation site polypeptides as immunogenic and/or antigenic epitopes as described elsewhere herein.

[0570] Moreover, in confirmation of HGPRBMY42_{—}1 representing a novel GPCR, the HGPRBMY42_{—}1 polypeptide was predicted to comprise a G-protein coupled receptor motif using the Motif algorithm (Genetics Computer Group, Inc.). G-protein coupled receptors (also called R7G) are an extensive group of hormones, neurotransmitters, odorants and light receptors which transduce extracellular signals by interaction with guanine nucleotide-binding (G) proteins. Some examples of receptors that belong to this family are provided as follows: 5-hydroxytryptamine (serotonin) 1A to 1F, 2A to 2C, 4, 5A, 5B, 6 and 7, Acetylcholine, muscarinic-type, M1 to M5, Adenosine A1, A2A, A2B and A3, Adrenergic alpha-1A to -1C; alpha-2A to -2D; beta-1 to -3, Angiotensin II types I and II, Bombesin subtypes 3 and 4, Bradykinin B1 and B2, c3a and C5a anaphylatoxin, Cannabinoid CB1 and CB2, Chemokines C-C CC-CKR-1 to CC-CKR-8, Chemokines C-X-C CXC-CKR-1 to CXC-CKR-4, Cholecystokinin-A and cholecystokinin-B/gastrin, Dopamine D1 to D5, Endothelin ET-a and ET-b, fMet-Leu-Phe (fMLP) (N-formyl peptide), Follicle stimulating hormone (FSH-R), Galanin, Gastrin-releasing peptide (GRP-R), Gonadotropin-releasing hormone (GNRH-R), Histamine H1 and H2 (gastric receptor I), Lutropin-choriogonadotropic hormone (LSH-R), Melanocortin MC1R to MC5R, Melatonin, Neuromedin B (NMB-R), Neuromedin K (NK-3R), Neuropeptide Y types 1 to 6, Neurotensin (NT-R), Octopamine (tyramine) from insects, Odorants, Opioids delta-, kappa- and mu-types, Oxytocin (OT-R), Platelet activating factor (PAF-R), Prostacyclin, Prostaglandin D2, Prostaglandin E2, EP1 to EP4 subtypes, Prostaglandin F2, Purinoreceptors (ATP), Somatostatin types 1 to 5, Substance-K (NK-2R), Substance-P (NK-1 R), Thrombin, Thromboxane A2, Thyrotropin (TSH-R), Thyrotropin releasing factor (TRH-R), Vasopressin V1a, V1b and V2, Visual pigments (opsins and rhodopsin), Proto-oncogene mas, Caenorhabditis elegans putative receptors C06G4.5, C38C10.1, C43C3.2,T27D1.3 and ZC84.4, Three putative receptors encoded in the genome of cytomegalovirus: US27, US28, and UL33., ECRF3, a putative receptor encoded in the genome of herpesvirus saimiri.

[0571] The structure of all GPCRs are thought to be identical. They have seven hydrophobic regions, each of which most probably spans the membrane. The N-terminus is located on the extracellular side of the membrane and is often glycosylated, while the C-terminus is cytoplasmic and generally phosphorylated. Three extracellular loops alternate with three intracellular loops to link the seven transmembrane regions. Most, but not all of these receptors, lack a signal peptide. The most conserved parts of these proteins are the transmembrane regions and the first two cytoplasmic loops. A conserved acidic-Arg-aromatic triplet is present in the N-terminal extremity of the second cytoplasmic loop and could be implicated in the interaction with G proteins.

[0572] The putative consensus sequence for GPCRs comprises the conserved triplet and also spans the major part of the third transmembrane helix, and is as follows:

[GSTALIVMFYWC]-[GSTANCPDE]-{EDPKRH}-x(2)-[LIVMNQGA]-x(2)-[LIVMFT]-[GSTANC]-[LIVMFYWSTAC]-[DENH]-R-[FYWCSH]-x(2)-[LIVM],

[0573] where “X” represents any amino acid.

[0574] Additional information relating to G-protein coupled receptors may be found in reference to the following publications: Strosberg A. D., Eur. J. Biochem. 196:1-10(1991); Kerlavage A. R., Curr. Opin. Struct. Biol. 1:394-401(1991); Probst W. C., Snyder L. A., Schuster D. I., Brosius J., Sealfon S. C., DNA Cell Biol. 11:1-20(1992); Savarese T. M., Fraser C. M., Biochem. J. 283:1-9(1992); Branchek T., Curr. Biol. 3:315-317(1993); Stiles G. L., J. Biol. Chem. 267:6451-6454(1992); Friell T., Kobilka B. K., Lefkowitz R. J., Caron M. G., Trends Neurosci. 11:321-324(1988); Stevens C. F., Cuff. Biol. 1:20-22(1991); Sakurai T., Yanagisawa M., Masaki T., Trends Pharmacol. Sci. 13:103-107(1992); Salesse R., Remy J. J., Levin J. M., Jallal B., Gamier J., Biochimie 73:109-120(1991); Lancet D., Ben-Arie N., Curr. Biol. 3:668-674(1993); Uhl G. R., Childers S., Pasternak G., Trends Neurosci. 17:89-93(1994); Barnard E. A., Burnstock G., Webb T. E., Trends Pharmacol. Sci. 15:67-70(1994); Applebury M. L., Hargrave P. A., Vision Res. 26:1881-1895(1986); Attwood T. K., Eliopoulos E. E., Findlay J. B. C., Gene 98:153-159(1991); http://www.gcrdb.uthscsa.edu/; and http://swift.embl-heidelberg.de/7tm/.

[0575] In preferred embodiments, the following G-protein coupled receptors signature polypeptide is encompassed by the present invention: HLFAFASVNTIVVVSVDRYLSIIHPLS (SEQ ID NO:382). Polynucleotides encoding this polypeptide are also provided. The present invention also encompasses the use of the HGPRBMY42_{—}1 G-protein coupled receptors signature polypeptide as immunogenic and/or antigenic epitopes as described elsewhere herein.

[0576] Many polynucleotide sequences, such as EST sequences, are publicly available and accessible through sequence databases. Some of these sequences are related to SEQ ID NO:15 and may have been publicly available prior to conception of the present invention. Preferably, such related polynucleotides are specifically excluded from the scope of the present invention. To list every related sequence would be cumbersome. Accordingly, preferably excluded from the present invention are one or more polynucleotides consisting of a nucleotide sequence described by the general formula of a-b, where a is any integer between 1 to 1183 of SEQ ID NO:15, b is an integer between 15 to 1197, where both a and b correspond to the positions of nucleotide residues shown in SEQ ID NO:15, and where b is greater than or equal to a+14

[0577] Features of the Polypeptide Encoded by Gene No:9

[0578] The polypeptide of this gene provided as SEQ ID NO:18 (FIGS. 9A-B), encoded by the polynucleotide sequence according to SEQ ID NO:17 (FIGS. 9A-B), and/or encoded by the polynucleotide contained within the deposited clone, HGPRBMY43 (also referred to as GPCR96), has significant homology at the nucleotide and amino acid level to a number of G-protein coupled receptors, specifically, the human leucocyte antigen CD97 precursor protein (CD97_HUMAN; SWISS-PROT Accession No: P48960; SEQ ID NO:56); the human CD97 protein (O00718; SWISS-PROT Accession No: O00718; SEQ ID NO:57); the mouse CD97 antigen protein (Q9JLQ8; SWISS-PROT Accession No: Q9JLQ8; SEQ ID NO:58); the mouse leucocyte antigen CD97 precursor protein (Q9Z0M6; SWISS-PROT Accession No: Q9Z0M6; SEQ ID NO:59); the human EMR1 hormone receptor protein (EMR1_HUMAN; SWISS-PROT Accession No: Q14246; SEQ ID NO:60); the mouse EMR1 hormone receptor protein (EMR1_MOUSE; SWISS-PROT Accession No: Q61549; SEQ ID NO:61); the human EGF-like module EMR2 protein (Q9UHX3; SWISS-PROT Accession No: Q9UHX3; SEQ ID NO:62); the human R29368_{—}2 protein (Q9Y4B1; SWISS-PROT Accession No: Q9Y4B1; SEQ ID NO:63); the human FLJ0005 protein (Q9H7Q2; SWISS-PROT Accession No: Q9H7Q2; SEQ ID NO:64); the human EGF-like module-containing mucin-like receptor EMR3 protein (Q9BY15; SWISS-PROT Accession No: Q9BY15; SEQ ID NO:65); and the human KIAA0768 protein (O94867; SWISS-PROT Accession No: O94867; SEQ ID NO:66). An alignment of the HGPRBMY43, polypeptide with these proteins is provided in FIGS. 31A-F.

[0579] The determined nucleotide sequence of the HGPRBMY43, cDNA in FIGS. 9A-B (SEQ ID NO:17) contains an open reading frame encoding a protein of about 389 amino acid residues, with a deduced molecular weight of about 43.8 kDa. The amino acid sequence of the predicted HGPRBMY43 polypeptide is shown in FIGS. 9A-B (SEQ ID NO:18). The HGPRBMY43 protein shown in FIGS. 9A-B was determined to share significant identity and similarity to several known G-protein coupled receptors, as shown in FIGS. 31A-F. The percent identity and similarity values between the HGPRBMY43 polypeptide to these known G-protein coupled receptors is provided in FIGS. 34.

[0580] The HGPRBMY43 polypeptide was predicted to comprise seven transmembrane domains (TM1 to TM7) located from about amino acid 101 to about amino acid 120 (TM1; SEQ ID NO:383); from about amino acid 132 to about amino acid 150 (TM2; SEQ ID NO:384); from about amino acid 156 to about amino acid 174 (TM3; SEQ ID NO:385); from about amino acid 205 to about amino acid 226 (TM4; SEQ ID NO:386); from about amino acid 242 to about amino acid 269 (TM5; SEQ ID NO:387); from about amino acid 293 to about amino acid 311 (TM6; SEQ ID NO:388); and/or from about amino acid 318 to about amino acid 340 (TM7; SEQ ID NO:389) of SEQ ID NO:18 (FIGS. 9A-B). In this context, the term “about” may be construed to mean 1, 2, 3, 4, 5, 6, 7, 8, 9, or 10 amino acids beyond the N-Terminus and/or C-terminus of the above referenced transmembrane domain polypeptides.

[0581] In preferred embodiments, the following transmembrane domain polypeptides are encompassed by the present invention: VGLTISLLCLFLAILTFLLC (SEQ ID NO:383), LELSLCLFLAHLLFLTGIN (SEQ ID NO:384), VLCSIIAGLLHFLYLACFT (SEQ ID NO:385), FMYPVGYGIPAVIIAVSAIVGP (SEQ ID NO:386), GFIWSFMGPVAVIILINLVFYFQVLWIL (SEQ ID NO:387), AISQLFILGCSWGLGFFMV (SEQ ID NO:388), and/or IGSIIAYSFTIINTLQGVLLFVV (SEQ ID NO:389). Polynucleotides encoding these polypeptides are also provided. The present invention also encompasses the use of these HGPRBMY43 transmembrane domain polypeptides as immunogenic and/or antigenic epitopes as described elsewhere herein.

[0582] The present invention also encompasses the polypeptide sequences that intervene between each of the predicted HGPRBMY43 transmembrane domains. Since these regions are solvent accessible either extracellularly or intracellularly, they are particularly useful for designing antibodies specific to each region. Such antibodies may be useful as antagonists or agonists of the HGPRBMY43 full-length polypeptide and may modulate its activity.

[0583] In preferred embodiments, the following inter-transmembrane domain polypeptides are encompassed by the present invention: RPIQNTSTSLH (SEQ ID NO:390), RTEPE (SEQ ID NO:391), WMLLEGLHLFLTVRNLKVANYTSTGRFKKR (SEQ ID NO:392), QNYGTFTHCWLKLDK (SEQ ID NO:393), RSKLSSLNKEVSTIQDTRVMTFK (SEQ ID NO:394), and/or EEVGKT (SEQ ID NO:395).

[0584] In preferred embodiments, the present invention encompasses the use of N-terminal deletions, C-terminal deletions, or any combination of N-terminal and C-terminal deletions of any one or more of the HGPRBMY43 TM1 thru TM7 transmembrane domain polypeptides as antigenic and/or immunogenic epitopes.

[0585] In preferred embodiments, the present invention also encompasses the use of N-terminal deletions, C-terminal deletions, or any combination of N-terminal and C-terminal deletions of any one or more of the amino acids intervening (i.e., GPCR extracellular or intracellular loops) the HGPRBMY43 TM1 thru TM7 transmembrane domain polypeptides as antigenic and/or immunogenic epitopes.

[0586] The HGPRBMY43 polypeptide was also determined to comprise several conserved cysteines which are denoted by dark shading, in addition to other identical residues, as shown in FIGS. 31A-F. Conservation of cysteines at key amino acid residues is indicative of conserved structural features, which may correlate with conservation of protein function and/or activity.

[0587] Expression profiling designed to measure the steady state mRNA levels encoding the HGPRBMY42 polypeptide showed predominately high expression levels in lymph node, spleen; significantly in testis, bone marrow, small intestine, and to a lesser extent, in other tissues as shown (See FIG. 33).

[0588] Expanded analysis of HGPRBMY43 expression levels by TaqMan™ quantitative PCR (see FIG. 41) confirmed that the HGPRBMY43 polypeptide is expressed in spleen, testis, and small intestine (FIG. 33). HGPRBMY43 mRNA was expressed predominately in the testis, spleen, and the lower gastrointestinal tract. HGPRBMY43 was also significantly expressed in lung parenchyma, and the tonsil.

[0589] Based upon the strong homology to members of the G-protein coupled receptor proteins, the HGPRBMY43 polypeptide is expected to share at least some biological activity with G-protein coupled receptors, specifically the CD97 protein and/or hormone receptors, and more preferably with G-protein coupled receptors found within lymph node, spleen, testis, bone marrow, and/or small intestine, in addition to the G-protein coupled receptors referenced elsewhere herein.

[0590] The HGPRBMY43 polynucleotides and polypeptides of the present invention, including agonists and/or fragments thereof, have uses that include detecting, prognosing, treating, preventing, and/or ameliorating the following diseases and/or disorders, neural disorders, metabolic disorders, gastrointestinal disorders, reproductive disorders, Alzheimer's, Parkinson's, diabetes, dwarfism, color blindness, retinal pigmentosa and asthma, depression, schizophrenia, sleeplessness, hypertension, anxiety, stress, renal failure, acute heart failure, hypotension, hypertension, endocrinal diseases, growth disorders, neuropathic pain, obesity, anorexia, HIV infections, cancers, bulimia, asthma, Parkinson's disease, osteoporosis, angina pectoris, myocardial infarction, psychotic, metabolic, cardiovascular and neurological disorders. Also, compounds acting on this receptor can be used as taste modifiers.

[0591] The HGPRBMY43 polynucleotides and polypeptides of the present invention, including agonists and/or fragments thereof, have uses that include modulating signal transduction activity, in various cells, tissues, and organisms, and particularly in mammalian lymph node, spleen, testis, bone marrow, and/or small intestine; preferably human tissue.

[0592] The strong homology to G-protein coupled receptors, particularly the CD97 protein and hormone receptors, combined with the predominate localized expression of HGPRBMY43 in lymph node, spleen, bone marrow, and tonsil suggests the HGPRBMY43 polynucleotides and polypeptides may be useful in treating, diagnosing, prognosing, and/or preventing immune diseases and/or disorders. Representative uses are described in the “Immune Activity”, “Chemotaxis”, and “Infectious Disease” sections below, and elsewhere herein. Briefly, the strong expression in immune tissue indicates a role in regulating the proliferation; survival; differentiation; and/or activation of hematopoietic cell lineages, including blood stem cells.

[0593] The HGPRBMY43 polypeptide may also be useful as a preventative agent for immunological disorders including arthritis, asthma, immunodeficiency diseases such as AIDS, leukemia, rheumatoid arthritis, granulomatous disease, inflammatory bowel disease, sepsis, acne, neutropenia, neutrophilia, psoriasis, hypersensitivities, such as T-cell mediated cytotoxicity; immune reactions to transplanted organs and tissues, such as host-versus-graft and graft-versus-host diseases, or autoimmunity disorders, such as autoimmune infertility, lense tissue injury, demyelination, systemic lupus erythematosis, drug induced hemolytic anemia, rheumatoid arthritis, Sjogren's disease, and scleroderma. The HGPRBMY43 polypeptide may be useful for modulating cytokine production, antigen presentation, or other processes, such as for boosting immune responses, etc.

[0594] Moreover, the protein may represent a factor that influences the differentiation or behavior of other blood cells, or that recruits hematopoietic cells to sites of injury. Thus, this gene product is thought to be useful in the expansion of stem cells and committed progenitors of various blood lineages, and in the differentiation and/or proliferation of various cell types. Furthermore, the protein may also be used to determine biological activity, raise antibodies, as tissuemarkers, to isolate cognate ligands or receptors, to identify agents that modulate their interactions, in addition to its use as a nutritional supplement. Protein, as well as, antibodies directed against the protein may show utility as a tumor marker and/or immunotherapy targets for the above listed tissues.

[0595] The HGPRBMY43 polynucleotides and polypeptides, including fragments and agonists thereof, may have uses which include, either directly or indirectly, for boosting immune responses.

[0596] The strong homology to G-protein coupled receptors, particularly the CD97 protein and hormone receptors, combined with the predominate localized expression of HGPRBMY43 in testis suggests the potential utility for HGPRBMY43 polynucleotides and polypeptides in treating, diagnosing, prognosing, and/or preventing testicular, in addition to reproductive disorders.

[0597] In preferred embodiments, HGPRBMY43 polynucleotides and polypeptides including agonists and fragments thereof, have uses which include treating, diagnosing, prognosing, and/or preventing the following, non-limiting, diseases or disorders of the testis: spermatogenesis, infertility, Klinefelter's syndrome, XX male, epididymitis, genital warts, germinal cell aplasia, cryptorchidism, varicocele, immotile cilia syndrome, and viral orchitis. The HGPRBMY43 polynucleotides and polypeptides including agonists and fragments thereof, may also have uses related to modulating testicular development, embryogenesis, reproduction, and in ameliorating, treating, and/or preventing testicular proliferative disorders (e.g., cancers, which include, for example, choriocarcinoma, Nonseminoma, seminona, and testicular germ cell tumors).

[0598] Likewise, the predominate localized expression in testis tissue also emphasizes the potential utility for HGPRBMY43 polynucleotides and polypeptides in treating, diagnosing, prognosing, and/or preventing metabolic diseases and disorders which include the following, not limiting examples: premature puberty, incomplete puberty, Kallman syndrome, Cushing's syndrome, hyperprolactinemia, hemochromatosis, congenital adrenal hyperplasia, FSH deficiency, and granulomatous disease, for example.

[0599] This gene product may also be useful in assays designed to identify binding agents, as such agents (antagonists) are useful as male contraceptive agents. The testes are also a site of active gene expression of transcripts that is expressed, particularly at low levels, in other tissues of the body. Therefore, this gene product may be expressed in other specific tissues or organs where it may play related functional roles in other processes, such as hematopoiesis, inflammation, bone formation, and kidney function, to name a few possible target indications.

[0600] The strong homology to G-protein coupled receptors, particularly the CD97 protein and hormone receptors, combined with the predominate localized expression of HGPRBMY43 in small intestine suggests the HGPRBMY43 polynucleotides and polypeptides, including modulators thereof, may be useful in treating, diagnosing, prognosing, and/or preventing gastrointesinal diseases and/or disorders, which include, but are not limited to, ulcers, irritable bowel syndrome, inflammatory bowel disease, diarrhea, traveler's diarrhea, drug-related diarrhea, polyps, absorption disorders, constipation, diverticulitis, vascular disease of the intestines, intestinal obstruction, intestinal infections, ulcerative colitis, Shigellosis, cholera, Crohn's Disease, amebiasis, enteric fever, Whipple's Disease, peritonitis, intrabdominal abcesses, hereditary hemochromatosis, gastroenteritis, viral gastroenteritis, food poisoning, mesenteric ischemia, mesenteric infarction, in addition to, metabolic diseases and/or disorders.

[0601] Moreover, polynucleotides and polypeptides, including fragments and/or antagonists thereof, have uses which include, directly or indirectly, treating, preventing, diagnosing, and/or prognosing susceptibility to the following, non-limiting, gastrointestinal infections: Salmonella infection, E.coli infection, E.coli O157:H7 infection, Shiga Toxin-producing E.coli infection, Campylobacter infection (e.g., Campylobacter fetus, Campylobacter upsaliensis, Campylobacter hyointestinalis, Campylobacter lari, Campylobacter jejuni, Campylobacter concisus, Campylobacter mucosalis, Campylobacter sputorum, Campylobacter rectus, Campylobacter curvus, Campylobacter sputorum, etc.), Heliobacter infection (e.g., Heliobacter cinaedi, Heliobacter fennelliae, etc.)Yersinia enterocolitica infection, Vibrio sp. Infection (e.g., Vibrio mimicus, Vibrio parahaemolyticus, Vibrio fluvialis, Vibrio furnissii, Vibrio hollisae, Vibrio vulnificus, Vibrio alginolyticus, Vibrio metschnikovii, Vibrio damsela, Vibrio cincinnatiensis, etc.) Aeromonas infection (e.g., Aeromonas hydrophila, Aeromonas sobira, Aeromonas caviae, etc.), Plesiomonas shigelliodes infection, Giardia infection (e.g., Giardia lamblia, etc.), Cryptosporidium infection, Listeria infection, Entamoeba histolytica infection, Rotavirus infection, Norwalk virus infection, Clostridium difficile infection, Clostriudium perfringens infection, Staphylococcus infection, Bacillus infection, in addition to any other gastrointestinal disease and/or disorder implicated by the causative agents listed above or elsewhere herein.

[0602] The HGPRBMY43 polynucleotides and polypeptides, including fragments and/or modulators thereof, may have uses which include identification of modulators of HGPRBMY43 function including antibodies (for detection or neutralization), naturally-occurring modulators and small molecule modulators. Antibodies to domains of the HGPRBMY43 protein could be used as diagnostic agents of cardiovascular and inflammatory conditions in patients, are useful in monitoring the activation of signal transduction pathways, and can be used as a biomarker for the involvement of G-protein couplded receptors in disease states, and in the evaluation of inhibitors of G-protein coupled receptors in vivo.

[0603] HGPRBMY43 polypeptides and polynucleotides have additional uses which include diagnosing diseases related to the over and/or under expression of HGPRBMY43 by identifying mutations in the HGPRBMY43 gene by using HGPRBMY43 sequences as probes or by determining HGPRBMY43 protein or mRNA expression levels. HGPRBMY43 polypeptides may be useful for screening compounds that affect the activity of the protein. HGPRBMY43 peptides can also be used for the generation of specific antibodies and as bait in yeast two hybrid screens to find proteins the specifically interact with HGPRBMY43 (described elsewhere herein).

[0604] Although it is believed the encoded polypeptide may share at least some biological activities with human G-protein coupled receptor proteins (particularly G-protein coupled receptors belonging to the hormone receptor family), a number of methods of determining the exact biological function of this clone are either known in the art or are described elsewhere herein. Briefly, the function of this clone may be determined by applying microarray methodology. Nucleic acids corresponding to the HGPRBMY43 polynucleotides, in addition to, other clones of the present invention, may be arrayed on microchips for expression profiling. Depending on which polynucleotide probe is used to hybridize to the slides, a change in expression of a specific gene may provide additional insight into the function of this gene based upon the conditions being studied. For example, an observed increase or decrease in expression levels when the polynucleotide probe used comes from diseased immune tissue, as compared to, normal tissue might indicate a function in modulating immune function, for example. In the case of HGPRBMY43, lymph node, spleen, testis, bone marrow, and/or small intestine tissue should be used, for example, to extract RNA to prepare the probe.

[0605] In addition, the function of the protein may be assessed by applying quantitative PCR methodology, for example. Real time quantitative PCR would provide the capability of following the expression of the HGPRBMY43 gene throughout development, for example. Quantitative PCR methodology requires only a nominal amount of tissue from each developmentally important step is needed to perform such experiments. Therefore, the application of quantitative PCR methodology to refining the biological function of this polypeptide is encompassed by the present invention. In the case of HGPRBMY43, a disease correlation related to HGPRBMY43 may be made by comparing the mRNA expression level of HGPRBMY43 in normal tissue, as compared to diseased tissue (particularly diseased tissue isolated from the following: lymph node, spleen, testis, bone marrow, and/or small intestine tissue). Significantly higher or lower levels of HGPRBMY43 expression in the diseased tissue may suggest HGPRBMY43 plays a role in disease progression, and antagonists against HGPRBMY43 polypeptides would be useful therapeutically in treating, preventing, and/or ameliorating the disease. Alternatively, significantly higher or lower levels of HGPRBMY43 expression in the diseased tissue may suggest HGPRBMY43 plays a defensive role against disease progression, and agonists of HGPRBMY43 polypeptides may be useful therapeutically in treating, preventing, and/or ameliorating the disease. Also encompassed by the present invention are quantitative PCR probes corresponding to the polynucleotide sequence provided as SEQ ID NO:17 (FIGS. 9A-B).

[0606] The function of the protein may also be assessed through complementation assays in yeast. For example, in the case of the HGPRBMY43, transforming yeast deficient in hormone receptor activity, for example, and assessing their ability to grow would provide convincing evidence the HGPRBMY43 polypeptide has adrenergic receptor activity. Additional assay conditions and methods that may be used in assessing the function of the polynucleotides and polypeptides of the present invention are known in the art, some of which are disclosed elsewhere herein.

[0607] Alternatively, the biological function of the encoded polypeptide may be determined by disrupting a homologue of this polypeptide in Mice and/or rats and observing the resulting phenotype. Such knock-out experiments are known in the art, some of which are disclosed elsewhere herein.

[0608] Moreover, the biological function of this polypeptide may be determined by the application of antisense and/or sense methodology and the resulting generation of transgenic mice and/or rats. Expressing a particular gene in either sense or antisense orientation in a transgenic mouse or rat could lead to respectively higher or lower expression levels of that particular gene. Altering the endogenous expression levels of a gene can lead to the observation of a particular phenotype that can then be used to derive indications on the function of the gene. The gene can be either over-expressed or under expressed in every cell of the organism at all times using a strong ubiquitous promoter, or it could be expressed in one or more discrete parts of the organism using a well characterized tissue-specific promoter (e.g., lymph node, spleen, testis, bone marrow, and/or small intestine tissue-specific promoter), or it can be expressed at a specified time of development using an inducible and/or a developmentally regulated promoter.

[0609] In the case of HGPRBMY43 transgenic mice or rats, if no phenotype is apparent in normal growth conditions, observing the organism under diseased conditions (immune, hematopoietic, reproductive, gastrointestinal diseases and disorders, in addition to cancers, etc.) may lead to understanding the function of the gene. Therefore, the application of antisense and/or sense methodology to the creation of transgenic mice or rats to refine the biological function of the polypeptide is encompassed by the present invention.

[0610] In preferred embodiments, the following N-terminal HGPRBMY43 deletion polypeptides are encompassed by the present invention: M1-S389, Q2-S389, E3-S389, V4-S389, K5-S389, L6-S389, N7-S389, S8-S389, Y9-S389, V10-S389, V11-S389, S12-S389, G13-S389, T14-S389, I15-S389, G16-S389, L17-S389, K18-S389, E19-S389, K20-S389, I21-S389, S22-S389, L23-S389, S24-S389, E25-S389, P26-S389, V27-S389, F28-S389, L29-S389, T30-S389, F31-S389, R32-S389, H33-S389, N34-S389, Q35-S389, P36-S389, G37-S389, D38-S389, K39-S389, R40-S389, T41-S389, K42-S389, H43-S389, I44-S389, C45-S389, V46-S389, Y47-S389, W48-S389, E49-S389, G50-S389, S51-S389, E52-S389, G53-S389, G54-S389, R55-S389, W56-S389, S57-S389, T58-S389, E59-S389, G60-S389, C61-S389, S62-S389, H63-S389, V64-S389, H65-S389, S66-S389, N67-S389, G68-S389, S69-S389, Y70-S389, T71-S389, K72-S389, C73-S389, K74-S389, C75-S389, F76-S389, H77-S389, L78-S389, S79-S389, S80-S389, F81-S389, A82-S389, V83-S389, L84-S389, V85-S389, A86-S389, L87-S389, A88-S389, P89-S389, K90-S389, E91-S389, D92-S389, P93-S389, V94-S389, L95-S389, T96-S389, V97-S389, I98-S389, T99-S389, Q100-S389, V101-S389, G102-S389, L103-S389, T104-S389, I105-S389, S106-S389, L107-S389, L108-S389, C109-S389, L110-S389, F111-S389, L112-S389, A113-S389, I114-S389, L115-S389, T116-S389, F117-S389, L118-S389, L119-S389, C120-S389, R121-S389, P122-S389, I123-S389, Q124-S389, N125-S389, T126-S389, S127-S389, T128-S389, S129-S389, L130-S389, H131-S389, L132-S389, E133-S389, L134-S389, S135-S389, L136-S389, C137-S389, L138-S389, F139-S389, L140-S389, A141-S389, H142-S389, L143-S389, L144-S389, F145-S389, L146-S389, T147-S389, G148-S389, I149-S389, N150-S389, R151-S389, T152-S389, E153-S389, P154-S389, E155-S389, V156-S389, L157-S389, C158-S389, S159-S389, I160-S389, I161-S389, A162-S389, G163-S389, L164-S389, L165-S389, H166-S389, F167-S389, L168-S389, Y169-S389, L170-S389, A171-S389, C172-S389, F173-S389, T174-S389, W175-S389, M176-S389, L177-S389, L178-S389, E179-S389, G180-S389, L181-S389, H182-S389, L183-S389, F184-S389, L185-S389, T186-S389, V187-S389, R188-S389, N189-S389, L190-S389, K191-S389, V192-S389, A193-S389, N194-S389, Y195-S389, T196-S389, S197-S389, T198-S389, G199-S389, R200-S389, F201-S389, K202-S389, K203-S389, R204-S389, F205-S389, M206-S389, Y207-S389, P208-S389, V209-S389, G210-S389, Y211-S389, G212-S389, I213-S389, P214-S389, A215-S389, V216-S389, I217-S389, I218-S389, A219-S389, V220-S389, S221-S389, A222-S389, I223-S389, V224-S389, G225-S389, P226-S389, Q227-S389, N228-S389, Y229-S389, G230-S389, T231-S389, F232-S389, T233-S389, H234-S389, C235-S389, W236-S389, L237-S389, K238-S389, L239-S389, D240-S389, K241-S389, G242-S389, F243-S389, I244-S389, W245-S389, S246-S389, F247-S389, M248-S389, G249-S389, P250-S389, V251-S389, A252-S389, V253-S389, I254-S389, I255-S389, L256-S389, I257-S389, N258-S389, L259-S389, V260-S389, F261-S389, Y262-S389, F263-S389, Q264-S389, V265-S389, L266-S389, W267-S389, I268-S389, L269-S389, R270-S389, S271-S389, K272-S389, L273-S389, S274-S389, S275-S389, L276-S389, N277-S389, K278-S389, E279-S389, V280-S389, S281-S389, T282-S389, I283-S389, Q284-S389, D285-S389, T286-S389, R287-S389, V288-S389, M289-S389, T290-S389, F291-S389, K292-S389, A293-S389, I294-S389, S295-S389, Q296-S389, L297-S389, F298-S389, I299-S389, L300-S389, G301-S389, C302-S389, S303-S389, W304-S389, G305-S389, L306-S389, G307-S389, F308-S389, F309-S389, M310-S389, V311-S389, E312-S389, E313-S389, V314-S389, G315-S389, K316-S389, T317-S389, I318-S389, G319-S389, S320-S389, I321-S389, I322-S389, A323-S389, Y324-S389, S325-S389, F326-S389, T327-S389, 1328-S389, I329-S389, N330-S389, T331-S389, L332-S389, Q333-S389, G334-S389, V335-S389, L336-S389, L337-S389, F338-S389, V339-S389, V340-S389, H341-S389, C342-S389, L343-S389, L344-S389, N345-S389, R346-S389, Q347-S389, V348-S389, R349-S389, M350-S389, E351-S389, Y352-S389, K353-S389, K354-S389, W355-S389, F356-S389, S357-S389, G358-S389, M359-S389, R360-S389, K361-S389, G362-S389, V363-S389, E364-S389, T365-S389, E366-S389, S367-S389, T368-S389, E369-S389, M370-S389, S371-S389, R372-S389, S373-S389, T374-S389, T375-S389, Q376-S389, P377-S389, N378-S389, G379-S389, R380-S389, S381-S389, G382-S389, and/or E383-S389 of SEQ ID NO:18. Polynucleotide sequences encoding these polypeptides are also provided. The present invention also encompasses the use of these N-terminal HGPRBMY43 deletion polypeptides as immunogenic and/or antigenic epitopes as described elsewhere herein.

[0611] In preferred embodiments, the following C-terminal HGPRBMY43 deletion polypeptides are encompassed by the present invention: M1-S389, M1-L388, M1-N387, M1-R386, M1-L385, M1-V384, M1-E383, M1-G382, M1-S381, M1-R380, M1-G379, M1-N378, M1-P377, M1-Q376, M1-T375, M1-T374, M1-S373, M1-R372, M1-S371, M1-M370, M1-E369, M1-T368, M1-S367, M1-E366, M1-T365, M1-E364, M1-V363, M1-G362, M1-K361, M1-R360, M1-M359, M1-G358, M1-S357, M1-F356, M1-W355, M1-K354, M1-K353, M1-Y352, M1-E351, M1-M350, M1-R349, M1-V348, M1-Q347, M1-R346, M1-N345, M1-L344, M1-L343, M1-C342, M1-H341, M1-V340, M1-V339, M1-F338, M1-L337, M1-L336, M1-V335, M1-G334, M1-Q333, M1-L332, M1-T331, M1-N330, M1-I329, M1-I328, M1-T327, M1-F326, M1-S325, M1-Y324, M1-A323, M1-I322, M1-I321, M1-S320, M1-G319, M1-I318, M1-T317, M1-K316, M1-G315, M1-V314, M1-E313, M1-E312, M1-V311, M1-M310, M1-F309, M1-F308, M1-G307, M1-L306, M1-G305, M1-W304, M1-S303, M1-C302, M1-G301, M1-L300, M1-I299, M1-F298, M1-L297, M1-Q296, M1-S295, M1-I294, M1-A293, M1-K292, M1-F291, M1-T290, M1-M289, M1-V288, M1-R287, M1-T286, M1-D285, M1-Q284, M1-I283, M1-T282, M1-S281, M1-V280, M1-E279, M1-K278, M1-N277, M1-L276, M1-S275, M1-S274, M1-L273, M1-K272, M1-S271, M1-R270, M1-L269, M1-I268, M1-W267, M1-L266, M1-V265, M1-Q264, M1-F263, M1-Y262, M1-F261, M1-V260, M1-L259, M1-N258, M1-I257, M1-L256, M1-I255, M1-I254, M1-V253, M1-A252, M1-V251, M1-P250, M1-G249, M1-M248, M1-F247, M1-S246, M1-W245, M1-I244, M1-F243, M1-G242, M1-K241, M1-D240, M1-L239, M1-K238, M1-L237, M1-W236, M1-C235, M1-H234, M1-T233, M1-F232, M1-T231, M1-G230, M1-Y229, M1-N228, M1-Q227, M1-P226, M1-G225, M1-V224, M1-I223, M1-A222, M1-S221, M1-V220, M1-A219, M1-I218, M1-I217, M1-V216, M1-A215, M1-P214, M1-I213, M1-G212, M1-Y211, M1-G210, M1-V209, M1-P208, M1-Y207, M1-M206, M1-F205, M1-R204, M1-K203, M1-K202, M1-F201, M1-R200, M1-G199, M1-T198, M1-S197, M1-T196, M1-Y195, M1-N194, M1-A193, M1-V192, M1-K191, M1-L190, M1-N189, M1-R188, M1-V187, M1-T186, M1-L185, M1-F184, M1-L183, M1-H182, M1-L181, M1-G180, M1-E179, M1-L178, M1-L177, M1-M176, M1-W175, M1-T174, M1-F173, M1-C172, M1-A171, M1-L170, M1-Y169, M1-L168, M1-F167, M1-H166, M1-L165, M1-L164, M1-G163, M1-A162, M1-I161, M1-I160, M1-S159, M1-C158, M1-L157, M1-V156, M1-E155, M1-P154, M1-E153, M1-T152, M1-R151, M1-N150, M1-I149, M1-G148, M1-T147, M1-L146, M1-F145, M1-L144, M1-L143, M1-H142, M1-A141, M1-L140, M1-F139, M1-L138, M1-C137, M1-L136, M1-S135, M1-L134, M1-E133, M1-L132, M1-H131, M1-L130, M1-S129, M1-T128, M1-S127, M1-T126, M1-N125, M1-Q124, M1-I123, M1-P122, M1-R121, M1-C120, M1-L119, M1-L118, M1-F117, M1-T116, M1-L 115, M1-I114, M1-A113, M1-L112, M1-F111, M1-L110, M1-C109, M1-L108, M1-L107, M1-S106, M1-I105, M1-T104, M1-L103, M1-G102, M1-V101, M1-Q100, M1-T99, M1-I98, M1-V97, M1-T96, M1-L95, M1-V94, M1-P93, M1-D92, M1-E91, M1-K90, M1-P89, M1-A88, M1-L87, M1-A86, M1-V85, M1-L84, M1-V83, M1-A82, M1-F81, M1-S80, M1-S79, M1-L78, M1-H77, M1-F76, M1-C75, M1-K74, M1-C73, M1-K72, M1-T71, M1-Y70, M1-S69, M1-G68, M1-N67, M1-S66, M1-H65, M1-V64, M1-H63, M1-S62, M1-C61, M1-G60, M1-E59, M1-T58, M1-S57, M1-W56, M1-R55, M1-G54, M1-G53, M1-E52, M1-S51, M1-G50, M1-E49, M1-W48, M1-Y47, M1-V46, M1-C45, M1-I44, M1-H43, M1-K42, M1-T41, M1-R40, M1-K39, M1-D38, M1-G37, M1-P36, M1-Q35, M1-N34, M1-H33, M1-R32, M1-F31, M1-T30, M1-L29, M1-F28, M1-V27, M1-P26, M1-E25, M1-S24, M1-L23, M1-S22, M1-I21, M1-K20, M1-E19, M1-K18, M1-L17, M1-G16, M1-I15, M1-T14, M1-G13, M1-S12, M1-V11, M1-V10, M1-Y9, M1-S8, and/or M1-N7 of SEQ ID NO:18. Polynucleotide sequences encoding these polypeptides are also provided. The present invention also encompasses the use of these C-terminal HGPRBMY43 deletion polypeptides as immunogenic and/or antigenic epitopes as described elsewhere herein.

[0612] Alternatively, preferred polypeptides of the present invention may comprise polypeptide sequences corresponding to, for example, internal regions of the HGPRBMY43 polypeptide (e.g., any combination of both N- and C-terminal HGPRBMY43 polypeptide deletions) of SEQ ID NO:18. For example, internal regions could be defined by the equation: amino acid NX to amino acid CX, wherein NX refers to any N-terminal deletion polypeptide amino acid of HGPRBMY43 (SEQ ID NO:18), and where CX refers to any C-terminal deletion polypeptide amino acid of HGPRBMY43 (SEQ ID NO:18). Polynucleotides encoding these polypeptides are also provided. The present invention also encompasses the use of these polypeptides as an immunogenic and/or antigenic epitope as described elsewhere herein.

[0613] The present invention also encompasses immunogenic and/or antigenic epitopes of the HGPRBMY43 polypeptide.

[0614] The HGPRBMY43 polypeptides of the present invention were determined to comprise several phosphorylation sites based upon the Motif algorithm (Genetics Computer Group, Inc.). The phosphorylation of such sites may regulate some biological activity of the HGPRBMY43 polypeptide. For example, phosphorylation at specific sites may be involved in regulating the proteins ability to associate or bind to other molecules (e.g., proteins, ligands, substrates, DNA, etc.). In the present case, phosphorylation may modulate the ability of the HGPRBMY43 polypeptide to associate with other polypeptides, particularly cognate ligand for HGPRBMY43, or its ability to modulate certain cellular signal pathways.

[0615] The HGPRBMY43 polypeptide was predicted to comprise four PKC phosphorylation sites using the Motif algorithm (Genetics Computer Group, Inc.). In vivo, protein kinase C exhibits a preference for the phosphorylation of serine or threonine residues. The PKC phosphorylation sites have the following consensus pattern: [ST]-x-[RK], where S or T represents the site of phosphorylation and ‘x’ an intervening amino acid residue. Additional information regarding PKC phosphorylation sites can be found in Woodget J. R., Gould K. L., Hunter T., Eur. J. Biochem. 161:177-184(1986), and Kishimoto A., Nishiyama K., Nakanishi H., Uratsuji Y., Nomura H., Takeyama Y., Nishizuka Y., J. Biol. Chem. 260:12492-12499(1985); which are hereby incorporated by reference herein.

[0616] In preferred embodiments, the following PKC phosphorylation site polypeptides are encompassed by the present invention: EPVFLTFRHNQPG (SEQ ID NO:396), LHLFLTVRNLKVA (SEQ ID NO:397), ANYTSTGRFKKRF (SEQ ID NO:398), and/or DTRVMTFKAISQL (SEQ ID NO:399). Polynucleotides encoding these polypeptides are also provided. The present invention also encompasses the use of the HGPRBMY43 PKC phosphorylation site polypeptides as immunogenic and/or antigenic epitopes as described elsewhere herein.

[0617] The HGPRBMY43 polypeptide was predicted to comprise three casein kinase II phosphorylation sites using the Motif algorithm (Genetics Computer Group, Inc.). Casein kinase II (CK-2) is a protein serine/threonine kinase whose activity is independent of cyclic nucleotides and calcium. CK-2 phosphorylates many different proteins. The substrate specificity [1] of this enzyme can be summarized as follows: (1) Under comparable conditions Ser is favored over Thr.; (2) An acidic residue (either Asp or Glu) must be present three residues from the C-terminal of the phosphate acceptor site; (3) Additional acidic residues in positions +1, +2, +4, and +5 increase the phosphorylation rate. Most physiological substrates have at least one acidic residue in these positions; (4) Asp is preferred to Glu as the provider of acidic determinants; and (5) A basic residue at the N-terminal of the acceptor site decreases the phosphorylation rate, while an acidic one will increase it.

[0618] A consensus pattern for casein kinase II phosphorylations site is as follows: [ST]-x(2)-[DE], wherein ‘x’ represents any amino acid, and S or T is the phosphorylation site.

[0619] Additional information specific to casein kinase II phosphorylation site-II domains may be found in reference to the following publication: Pinna L. A., Biochim.

[0620] Biophys. Acta 1054:267-284(1990); which is hereby incorporated herein in its entirety.

[0621] In preferred embodiments, the following casein kinase II phosphorylation site polypeptide is encompassed by the present invention: LKEKISLSEPVFLT (SEQ ID NO:400), TGINRTEPEVLCSI (SEQ ID NO:401), and/or NKEVSTIQDTRVMT (SEQ ID NO:402). Polynucleotides encoding these polypeptides are also provided. The present invention also encompasses the use of this casein kinase II phosphorylation site polypeptide as an immunogenic and/or antigenic epitope as described elsewhere herein.

[0622] The HGPRBMY43 polypeptide has been shown to comprise four glycosylation sites according to the Motif algorithm (Genetics Computer Group, Inc.). As discussed more specifically herein, protein glycosylation is thought to serve a variety of functions including: augmentation of protein folding, inhibition of protein aggregation, regulation of intracellular trafficking to organelles, increasing resistance to proteolysis, modulation of protein antigenicity, and mediation of intercellular adhesion.

[0623] Asparagine glycosylation sites have the following consensus pattern, N-{P}-[ST]-{P}, wherein N represents the glycosylation site. However, it is well known that that potential N-glycosylation sites are specific to the consensus sequence Asn-Xaa-Ser/Thr. However, the presence of the consensus tripeptide is not sufficient to conclude that an asparagine residue is glycosylated, due to the fact that the folding of the protein plays an important role in the regulation of N-glycosylation. It has been shown that the presence of proline between Asn and Ser/Thr will inhibit N-glycosylation; this has been confirmed by a recent statistical analysis of glycosylation sites, which also shows that about 50% of the sites that have a proline C-terminal to Ser/Thr are not glycosylated. Additional information relating to asparagine glycosylation may be found in reference to the following publications, which are hereby incorporated by reference herein: Marshall R. D., Annu. Rev. Biochem. 41:673-702(1972); Pless D. D., Lennarz W. J., Proc. Natl. Acad. Sci. U.S.A. 74:134-30 138(1977); Bause E., Biochem. J. 209:331-336(1983); Gavel Y., von Heijne G., Protein Eng. 3:433-442(1990); and Miletich J. P., Broze G. J. Jr., J. Biol. Chem. 265:11397-11404(1990).

[0624] In preferred embodiments, the following asparagine glycosylation site polypeptides are encompassed by the present invention: SHVHSNGSYTKCKC (SEQ ID NO:403), CRPIQNTSTSLHLE (SEQ ID NO:404), FLTGINRTEPEVLC (SEQ ID NO:405), and/or NLKVANYTSTGRFK (SEQ ID NO:406). Polynucleotides encoding these polypeptides are also provided. The present invention also encompasses the use of these HGPRBMY43 asparagine glycosylation site polypeptide as immunogenic and/or antigenic epitopes as described elsewhere herein.

[0625] The HGPRBMY43 polypeptide was predicted to comprise seven N-myristoylation sites using the Motif algorithm (Genetics Computer Group, Inc.). An appreciable number of eukaryotic proteins are acylated by the covalent addition of myristate (a C14-saturated fatty acid) to their N-terminal residue via an amide linkage. The sequence specificity of the enzyme responsible for this modification, myristoyl CoA:protein N-myristoyl transferase (NMT), has been derived from the sequence of known N-myristoylated proteins and from studies using synthetic peptides. The specificity seems to be the following: i.) The N-terminal residue must be glycine; ii.) In position 2, uncharged residues are allowed; iii.) Charged residues, proline and large hydrophobic residues are not allowed; iv.) In positions 3 and 4, most, if not all, residues are allowed; v.) In position 5, small uncharged residues are allowed (Ala, Ser, Thr, Cys, Asn and Gly). Serine is favored; and vi.) In position 6, proline is not allowed.

[0626] A consensus pattern for N-myristoylation is as follows: G-{EDRKHPFYW}-x(2)-[STAGCN]-{P}, wherein ‘x’ represents any amino acid, and G is the N-myristoylation site.

[0627] Additional information specific to N-myristoylation sites may be found in reference to the following publication: Towler D. A., Gordon J. I., Adams S. P., Glaser L., Annu. Rev. Biochem. 57:69-99(1988); and Grand R. J. A., Biochem. J. 258:625-638(1989); which is hereby incorporated herein in its entirety.

[0628] In preferred embodiments, the following N-myristoylation site polypeptides are encompassed by the present invention: CVYWEGSEGGRWSTEG (SEQ ID NO:407), WEGSEGGRWSTEGCSH (SEQ ID NO:408), VITQVGLTISLLCLFL (SEQ ID NO:409), LLFLTGINRTEPEVLC (SEQ ID NO:410), QLFILGCSWGLGFFMV (SEQ ID NO:411), VGKTIGSIIAYSFTII (SEQ ID NO:412), and/or KKWFSGMRKGVETEST (SEQ ID NO:413). Polynucleotides encoding these polypeptides are also provided. The present invention also encompasses the use of these N-myristoylation site polypeptides as immunogenic and/or antigenic epitopes as described elsewhere herein.

[0629] Many polynucleotide sequences, such as EST sequences, are publicly available and accessible through sequence databases. Some of these sequences are related to SEQ ID NO:17 and may have been publicly available prior to conception of the present invention. Preferably, such related polynucleotides are specifically excluded from the scope of the present invention. To list every related sequence would be cumbersome. Accordingly, preferably excluded from the present invention are one or more polynucleotides consisting of a nucleotide sequence described by the general formula of a-b, where a is any integer between 1 to 1156 of SEQ ID NO:17, b is an integer between 15 to 1170, where both a and b correspond to the positions of nucleotide residues shown in SEQ ID NO:17, and where b is greater than or equal to a+14

[0630] Features of the Polypeptide Encoded by Gene No: 10

[0631] The polypeptide of this gene provided as SEQ ID NO:20 (FIGS. 10A-D), encoded by the polynucleotide sequence according to SEQ ID NO:19 (FIGS. 10A-D), and/or encoded by the polynucleotide contained within the deposited clone, HGPRBMY44 (also referred to as GPCR106), has significant homology at the nucleotide and amino acid level to a number of G-protein coupled receptors, specifically, the mouse putative sweet taste receptor T1R1 protein (Q99PG5; SWISS-PROT Accession No: Q99PG5; SEQ ID NO:67); the mouse putative sweet taste receptor T1R1-b protein (Q99PG6; SWISS-PROT Accession No: Q99PG6; SEQ ID NO:68); the rat putative taste receptor TR1 protein (Q9Z0R8; SWISS-PROT Accession No: Q9Z0R8; SEQ ID NO:69); the rat putative taste receptor, TR2 protein (Q9Z0R7; SWISS-PROT Accession No: Q9Z0R7; SEQ ID NO:70); the goldfish odorant receptor 5.24 protein (Q9PW88; SWISS-PROT Accession No: Q14416; SEQ ID NO:71); the mouse parathyroid cell calcium-sensing receptor protein (CASR_MOUSE; SWISS-PROT Accession No: Q9QY96; SEQ ID NO:72); the rat parathyroid cell calcium-sensing receptor protein (CASR_RAT; SWISS-PROT Accession No: P48442; SEQ ID NO:73); the human parathyroid cell calcium-sensing receptor protein (CASR_HUMAN; SWISS-PROT Accession No: P41180; SEQ ID NO:74); the bovine parathyroid cell calcium-sensing receptor protein (CASR_BOVIN; SWISS-PROT Accession No: P35384; SEQ ID NO:75); the Fugu calcium2+ sensing receptor protein (O73635; SWISS-PROT Accession No: O73635; SEQ ID NO:76); the goldfish putative odorant receptor protein (O93552; SWISS-PROT Accession No: O93552; SEQ ID NO:77); the goldfish putative odorant receptor 2 protein (O93553; SWISS-PROT Accession No: O93553; SEQ ID NO:78); the fugu pheromone receptor protein (O73638; SWISS-PROT Accession No: O73638; SEQ ID NO:79); the fugu pheromone receptor 2 protein (O73636; SWISS-PROT Accession No: O73636; SEQ ID NO:80); the fugu pheromone receptor 3 protein (O73639; SWISS-PROT Accession No: O73639; SEQ ID NO:81); the fugu pheromone receptor 4 protein (O73637; SWISS-PROT Accession No: O73637; SEQ ID NO:82); the fugu pheromone receptor 5 protein (O73640; SWISS-PROT Accession No: O73640; SEQ ID NO:83); the mouse putative pheromone receptor V2R2 protein (O70410; SWISS-PROT Accession No: O70410; SEQ ID NO:84); and the human metabotropic glutamate receptor type 2 protein (Q9H3N6; SWISS-PROT Accession No: Q9Z0R8; SEQ ID NO:85). An alignment of the HGPRBMY44, polypeptide with these proteins is provided in FIGS. 35A-J.

[0632] The determined nucleotide sequence of the HGPRBMY44, cDNA in FIGS. 10A-D (SEQ ID NO:19) contains an open reading frame encoding a protein of about 926 amino acid residues, with a deduced molecular weight of about 104.7 kDa. The amino acid sequence of the predicted HGPRBMY44 polypeptide is shown in FIGS. 10A-D (SEQ ID NO:20). The HGPRBMY44 protein shown in FIGS. 10A-D was determined to share significant identity and similarity to several known G-protein coupled receptors, as shown in FIGS. 35A-J. The percent identity and similarity values between the HGPRBMY44 polypeptide to these known G-protein coupled receptors is provided in FIGS. 38.

[0633] The HGPRBMY44 polypeptide was also determined to comprise several conserved cysteines which are denoted by dark shading, in addition to other identical residues, as shown in FIGS. 35A-J. Conservation of cysteines at key amino acid residues is indicative of conserved structural features, which may correlate with conservation of protein function and/or activity.

[0634] Expression profiling designed to measure the steady state mRNA levels encoding the HGPRBMY42 polypeptide showed predominately high expression levels in testis, prostate, kidney, and to a lesser extent, in other tissues as shown. (See FIG. 37).

[0635] Based upon the strong homology to members of the G-protein coupled receptor proteins, the HGPRBMY44 polypeptide is expected to share at least some biological activity with G-protein coupled receptors, specifically taste receptors, sweet taste receptors, parathyroid cell calcium-sensing receptors, odorant receptors, and/or pheromone receptors, and more preferably with G-protein coupled receptors found within testis, prostate, and/or kidney, in addition to the G-protein coupled receptors referenced elsewhere herein.

[0636] The HGPRBMY44 polynucleotides and polypeptides of the present invention, including agonists and/or fragments thereof, have uses that include detecting, prognosing, treating, preventing, and/or ameliorating the following diseases and/or disorders, reproductive disorders, metabolic disorders, renal disorders, Alzheimer's, Parkinson's, diabetes, dwarfism, color blindness, retinal pigmentosa and asthma, depression, schizophrenia, sleeplessness, hypertension, anxiety, stress, renal failure, acute heart failure, hypotension, hypertension, endocrinal diseases, growth disorders, neuropathic pain, obesity, anorexia, HIV infections, cancers, bulimia, asthma, Parkinson's disease, osteoporosis, angina pectoris, myocardial infarction, psychotic, metabolic, cardiovascular and neurological disorders. Also, compounds acting on this receptor can be used as taste modifiers.

[0637] The HGPRBMY44 polynucleotides and polypeptides of the present invention, including agonists and/or fragments thereof, have uses that include modulating signal transduction activity, in various cells, tissues, and organisms, and particularly in mammalian testis, prostate, and/or kidney; preferably human tissue.

[0638] The strong homology to G-protein coupled receptors, particularly taste receptors and parathyroid cell calcium-sensing receptors, combined with the predominate localized expression of HGPRBMY44 in testis and prostate suggests the potential utility for HGPRBMY44 polynucleotides and polypeptides in treating, diagnosing, prognosing, and/or preventing testicular, in addition to reproductive disorders.

[0639] In preferred embodiments, HGPRBMY44 polynucleotides and polypeptides including agonists and fragments thereof, have uses which include treating, diagnosing, prognosing, and/or preventing the following, non-limiting, diseases or disorders of the testis: spermatogenesis, infertility, Klinefelter's syndrome, XX male, epididymitis, genital warts, germinal cell aplasia, cryptorchidism, varicocele, immotile cilia syndrome, and viral orchitis. The HGPRBMY44 polynucleotides and polypeptides including agonists and fragments thereof, may also have uses related to modulating testicular development, embryogenesis, reproduction, and in ameliorating, treating, and/or preventing testicular proliferative disorders (e.g., cancers, which include, for example, choriocarcinoma, Nonseminoma, seminona, and testicular germ cell tumors).

[0640] Likewise, the predominate localized expression in testis tissue also emphasizes the potential utility for HGPRBMY44 polynucleotides and polypeptides in treating, diagnosing, prognosing, and/or preventing metabolic diseases and disorders which include the following, not limiting examples: premature puberty, incomplete puberty, Kall man syndrome, Cushing's syndrome, hyperprolactinemi a, hemochromatosis, congenital adrenal hyperplasia, FSH deficiency, and granulomatous disease, for example.

[0641] This gene product may also be useful in assays designed to identify binding agents, as such agents (antagonists) are useful as male contraceptive agents. The testes are also a site of active gene expression of transcripts that is expressed, particularly at low levels, in other tissues of the body. Therefore, this gene product may be expressed in other specific tissues or organs where it may play related functional roles in other processes, such as hematopoiesis, inflammation, bone formation, and kidney function, to name a few possible target indications.

[0642] The HGPRBMY44 polynucleotides and polypeptides, including fragments and agonists thereof, may have uses which include, either directly or indirectly, for boosting immune responses.

[0643] The strong homology to G-protein coupled receptors, particularly taste receptors and parathyroid cell calcium-sensing receptors, combined with the localized expression of HGPRBMY44 in kidney suggests the HGPRBMY44 polynucleotides and polypeptides may be useful in treating, diagnosing, prognosing, and/or preventing renal diseases and/or disorders, which include, but are not limited to: nephritis, renal failure, nephrotic syndrome, urinary tract infection, hematuria, proteinuria, oliguria, polyuria, nocturia, edema, hypertension, electrolyte disorders, sterile pyuria, renal osteodystrophy, large kidneys, renal transport defects, nephrolithiasis, azotemia, anuria, urinary retention ,slowing of urinary stream, large prostate, flank tenderness, full bladder sensation after voiding, enuresis, dysuria,bacteriuria, kideny stones, glomerulonephritis, vasculitis, hemolytic uremic syndromes, thrombotic thrombocytopenic purpura, malignant hypertension, casts, tubulointerstitial kidney diseases, renal tubular acidosis, pyelonephritis, hydronephritis, nephrotic syndrome, crush syndrome, and/or renal colic, in addition to Wilm's Tumor Disease, and congenital kidney abnormalities such as horseshoe kidney, polycystic kidney, and Falconi's syndrome for example.

[0644] The HGPRBMY44 polynucleotides and polypeptides, including fragments and /or modulators thereof, may have uses which include identification of modulators of HGPRBMY44 function including antibodies (for detection or neutralization), naturally-occurring modulators and small molecule modulators. Antibodies to domains of the HGPRBMY44 protein could be used as diagnostic agents of cardiovascular and inflammatory conditions in patients, are useful in monitoring the activation of signal transduction pathways, and can be used as a biomarker for the involvement of G-protein couplded receptors in disease states, and in the evaluation of inhibitors of G-protein coupled receptors in vivo.

[0645] HGPRBMY44 polypeptides and polynucleotides have additional uses which include diagnosing diseases related to the over and/or under expression of HGPRBMY44 by identifying mutations in the HGPRBMY44 gene by using HGPRBMY44 sequences as probes or by determining HGPRBMY44 protein or mRNA expression levels. HGPRBMY44 polypeptides may be useful for screening compounds that affect the activity of the protein. HGPRBMY44 peptides can also be used for the generation of specific antibodies and as bait in yeast two hybrid screens to find proteins the specifically interact with HGPRBMY44 (described elsewhere herein).

[0646] Although it is believed the encoded polypeptide may share at least some biological activities with human G-protein coupled receptor proteins (particularly G-protein coupled receptors belonging to the taste receptor, parathyroid cell calcium-sensing receptor, odorant receptor, and pheromone receptor family), a number of methods of determining the exact biological function of this clone are either known in the art or are described elsewhere herein. Briefly, the function of this clone may be determined by applying microarray methodology. Nucleic acids corresponding to the HGPRBMY44 polynucleotides, in addition to, other clones of the present invention, may be arrayed on microchips for expression profiling. Depending on which polynucleotide probe is used to hybridize to the slides, a change in expression of a specific gene may provide additional insight into the function of this gene based upon the conditions being studied. For example, an observed increase or decrease in expression levels when the polynucleotide probe used comes from diseased testis tissue, as compared to, normal tissue might indicate a function in modulating testicular function, for example. In the case of HGPRBMY44, testis, prostate, and/or kidney tissue should be used, for example, to extract RNA to prepare the probe.

[0647] In addition, the function of the protein may be assessed by applying quantitative PCR methodology, for example. Real time quantitative PCR would provide the capability of following the expression of the HGPRBMY44 gene throughout development, for example. Quantitative PCR methodology requires only a nominal amount of tissue from each developmentally important step is needed to perform such experiments. Therefore, the application of quantitative PCR methodology to refining the biological function of this polypeptide is encompassed by the present invention. In the case of HGPRBMY44, a disease correlation related to HGPRBMY44 may be made by comparing the mRNA expression level of HGPRBMY44 in normal tissue, as compared to diseased tissue (particularly diseased tissue isolated from the following: testis, prostate, and/or kidney tissue). Significantly higher or lower levels of HGPRBMY44 expression in the diseased tissue may suggest HGPRBMY44 plays a role in disease progression, and antagonists against HGPRBMY44 polypeptides would be useful therapeutically in treating, preventing, and/or ameliorating the disease. Alternatively, significantly higher or lower levels of HGPRBMY44 expression in the diseased tissue may suggest HGPRBMY44 plays a defensive role against disease progression, and agonists of HGPRBMY44 polypeptides may be useful therapeutically in treating, preventing, and/or ameliorating the disease. Also encompassed by the present invention are quantitative PCR probes corresponding to the polynucleotide sequence provided as SEQ ID NO:19 (FIGS. 10A-D).

[0648] The function of the protein may also be assessed through complementation assays in yeast. For example, in the case of the HGPRBMY44, transforming yeast deficient in hormone receptor activity, for example, and assessing their ability to grow would provide convincing evidence the HGPRBMY44 polypeptide has adrenergic receptor activity. Additional assay conditions and methods that may be used in assessing the function of the polynucleotides and polypeptides of the present invention are known in the art, some of which are disclosed elsewhere herein.

[0649] Alternatively, the biological function of the encoded polypeptide may be determined by disrupting a homologue of this polypeptide in Mice and/or rats and observing the resulting phenotype. Such knock-out experiments are known in the art, some of which are disclosed elsewhere herein.

[0650] Moreover, the biological function of this polypeptide may be determined by the application of antisense and/or sense methodology and the resulting generation of transgenic mice and/or rats. Expressing a particular gene in either sense or antisense orientation in a transgenic mouse or rat could lead to respectively higher or lower expression levels of that particular gene. Altering the endogenous expression levels of a gene can lead to the observation of a particular phenotype that can then be used to derive indications on the function of the gene. The gene can be either over-expressed or under expressed in every cell of the organism at all times using a strong ubiquitous promoter, or it could be expressed in one or more discrete parts of the organism using a well characterized tissue-specific promoter (e.g., testis, prostate, and/or kidney tissue-specific promoter), or it can be expressed at a specified time of development using an inducible and/or a developmentally regulated promoter.

[0651] In the case of HGPRBMY44 transgenic mice or rats, if no phenotype is apparent in normal growth conditions, observing the organism under diseased conditions (reproductive, renal, and/or urogenital diseases and disorders, in addition to cancers, etc.) may lead to understanding the function of the gene. Therefore, the application of antisense and/or sense methodology to the creation of transgenic mice or rats to refine the biological function of the polypeptide is encompassed by the present invention.

[0652] In preferred embodiments, the following N-terminal HGPRBMY44 deletion polypeptides are encompassed by the present invention: M1-I926, A2-I926, F3-I926, L4-I926, I5-I926, I6-I926, L7-I926, I8-I926, T9-I926, C10-I926, F11-I926, V12-I926, I13-I926, I14-I926, L15-I926, A16-I926, T17-I926, S18-I926, Q19-I926, P20-I926, C21-I926, Q22-I926, T23-I926, P24-I926, D25-I926, D26-I926, F27-I926, V28-I926, A29-I926, A30-I926, T31-I926, S32-I926, P33-I926, G34-I926, H35-I926, I36-I926, I37-I926, I38-I926, G39-I926, G40-I926, L41-I926, F42-I926, A43-I926, I44-I926, H45-I926, E46-I926, K47-I926, M48-I926, L49-I926, S50-I926, S51-I926, E52-I926, D53-I926, S54-I926, P55-I926, R56-I926, R57-I926, P58-I926, Q59-I926, I60-I926, Q61-I926, E62-I926, C63-I926, V64-I926, G65-I926, F66-I926, E67-I926, I68-I926, S69-I926, V70-I926, F71-I926, L72-I926, Q73-I926, T74-I926, L75-I926, A76-I926, M77-I926, I78-I926, H79-I926, S80-I926, I81-I926, E82-I926, M83-I926, I84-I926, N85-I926, N86-I926, S87-I926, T88-I926, L89-I926, L90-I926, P91-I926, G92-I926, V93-I926, K94-I926, L95-I926, G96-I926, Y97-I926, E98-I926, I99-I926, Y100-I926, D101-I926, T102-I926, C103-I926, T104-I926, E105-I926, V106-I926, T107-I926, V108-I926, A109-I926, M110-I926, A111-I926, A112-I926, T113-I926, L114-I926, R115-I926, F116-I926, L117-I926, S118-I926, K119-I926, F120-I926, N121-I926, C122-I926, S123-I926, R124-I926, E125-I926, T126-I926, V127-I926, E128-I926, F129-I926, K130-I926, C131-I926, D132-I926, Y133-I926, S134-I926, S135-I926, Y136-I926, M137-I926, P138-I926, R139-I926, V140-I926, K141-I926, A142-I926, V143-I926, I144-I926, G145-I926, S146-I926, G147-I926, Y148-I926, S149-I926, E150-I926, I151-I926, T152-I926, M153-I926, A154-I926, V155-I926, S156-I926, R157-I926, M158-I926, L159-I926, N160-I926, L161-I926, Q162-I926, L163-I926, M164-I926, P 165-I926, Q166-I926, V 167-I926, G168-I926, Y169-I926, E170-I926, S171-I926, T172-I926, A173-I926, E174-I926, I175-I926, L176-I926, S177-I926, D178-I926, K179-I926, I180-I926, R181-I926, F182-I926, P183-I926, S184-I926, F185-I926, L186-I926, R187-I926, T188-I926, V189-I926, P190-I926, S191-I926, D192-I926, F193-I926, H194-I926, Q195-I926, I196-I926, K197-I926, A198-I926, M199-I926, A200-I926, H201-I926, L202-I926, I203-I926, Q204-I926, K205-I926, S206-I926, G207-I926, W208-I926, N209-I926, W210-I926, I211-I926, G212-I926, I213-I926, I214-I926, T215-I926, T216-I926, D217-I926, D218-I926, D219-I926, Y220-I926, G221-I926, R222-I926, L223-I926, A224-I926, L225-I926, N226-I926, T227-I926, F228-I926, I229-I926, I230-I926, Q231-I926, A232-I926, E233-I926, A234-I926, N235-I926, N236-I926, V237-I926, C238-I926, I239-I926, A240-I926, F241-I926, K242-I926, E243-I926, V244-I926, L245-I926, P246-I926, A247-I926, F248-I926, L249-I926, S250-I926, D251-I926, N252-I926, T253-I926, I254-I926, E255-I926, V256-I926, R257-I926, I 258-I926, N259-I926, R260-I926, T261-I926, L262-I926, K263-I926, K264-I926, I265-I926, 1266-I926, L267-I926, E268-I926, A269-I926, Q270-I926, V271-I926, N272-I926, V273-I926, I274-I926, V275-I926, V276-I926, F277-I926, L278-I926, R279-I926, Q280-I926, F281-I926, H282-I926, V283-I926, F284-I926, D285-I926, L286-I926, F287-I926, N288-I926, K289-I926, A290-I926, I291-I926, E292-I926, M293-I926, N294-I926, I295-I926, N296-I926, K297-I926, M298-I926, W299-I926, I300-I926, A301-I926, S302-I926, D303-I926, N304-I926, W305-I926, S306-I926, T307-I926, A308-I926, T309-I926, K310-I926, I311-I926, T312-I926, T313-I926, I314-I926, P315-I926, N316-I926, V317-I926, K318-I926, K319-I926, I320-I926, G321-I926, K322-I926, V323-I926, V324-I926, G325-I926, F326-I926, A327-I926, F328-I926, R329-I926, R330-I926, G331-I926, N332-I926, I333-I926, S334-I926, S335-I926, F336-I926, H337-I926, S338-I926, F339-I926, L340-I926, Q341-I926, N342-I926, L343-I926, H344-I926, L345-I926, L346-I926, P347-I926, S348-I926, D349-I926, S350-I926, H351-I926, K352-I926, L353-I926, L354-I926, H355-I926, E356-I926, Y357-I926, A358-I926, M359-I926, H360-I926, L361-I926, S362-I926, A363-I926, C364-I926, A365-I926, Y366-I926, V367-I926, K368-I926, D369-I926, T370-I926, D371-I926, L372-I926, S373-I926, Q374-I926, C375-I926, I376-I926, F377-I926, N378-I926, H379-I926, S380-I926, Q381-I926, R382-I926, T383-I926, L384-I926, A385-I926, Y386-I926, K387-I926, A388-I926, N389-I926, K390-I926, A391-I926, I392-I926, E393-I926, R394-I926, N395-I926, F396-I926, V397-I926, M398-I926, R399-I926, N400-I926, D401-I926, F402-I926, L403-I926, W404-I926, D405-I926, Y406-I926, A407-I926, E408-I926, P409-I926, G410-I926, L411-I926, I412-I926, H413-I926, S414-I926, I415-I926, Q416-I926, L417-I926, A418-I926, V419-I926, F420-I926, A421-I926, L422-I926, G423-I926, Y424-I926, A425-I926, I426-I926, R427-I926, D428-I926, L429-I926, C430-I926, Q431-I926, A432-I926, R433-I926, D434-I926, C435-I926, Q436-I926, N437-I926, P438-I926, N439-I926, A440-I926, F441-I926, Q442-I926, P443-I926, W444-I926, E445-I926, V446-I926, L447-I926, G448-I926, V449-I926, L450-I926, K451-I926, N452-I926, V453-I926, T454-I926, F455-I926, T456-I926, D457-I926, G458-I926, W459-I926, N460-I926, S461-I926, F462-I926, H463-I926, F464-I926, D465-I926, A466-I926, H467-I926, G468-I926, D469-I926, L470-I926, N471-I926, T472-I926, G473-I926, Y474-I926, D475-I926, V476-I926, V477-I926, L478-I926, W479-I926, K480-I926, E481-I926, I482-I926, N483-I926, G484-I926, H485-I926, M486-I926, T487-I926, V488-I926, T489-I926, K490-I926, M491-I926, A492-I926, E493-I926, Y494-I926, D495-I926, L496-I926, Q497-I926, N498-I926, D499-I926, V500-I926, F501-I926, I502-I926, I503-I926, P504-I926, D505-I926, Q506-I926, E507-I926, T508-I926, K509-I926, N510-I926, E511-I926, F512-I926, R513-I926, N514-I926, L515-I926, K516-I926, Q517-I926, I518-I926, Q519-I926, S520-I926, K521-I926, C522-I926, S523-I926, K524-I926, E525-I926, C526-I926, S527-I926, P528-I926, G529-I926, Q530-I926, M531-I926, K532-I926, K533-I926, T534-I926, T535-I926, R536-I926, S537-I926, Q538-I926, H539-I926, I540-I926, C541-I926, C542-I926, Y543-I926, E544-I926, C545-I926, Q546-I926, N547-I926, C548-I926, P549-I926, E550-I926, N551-I926, H552-I926, Y553-I926, T554-I926, N555-I926, Q556-I926, T557-I926, D558-I926, M559-I926, P560-I926, H561-I926, C562-I926, L563-I926, L564-I926, C565-I926, N566-I926, N567-I926, K568-I926, T569-I926, H570-I926, W571-I926, A572-I926, P573-I926, V574-I926, R575-I926, S576-I926, T577-I926, M578-I926, C579-I926, F580-I926, E581-I926, K582-I926, E583-I926, V584-I926, E585-I926, Y586-I926, L587-I926, N588-I926, W589-I926, N590-I926, D591-I926, S592-I926, L593-I926, A594-I926, I595-I926, L596-I926, L597-I926, L598-I926, I599-I926, L600-I926, S601-I926, L602-I926, L603-I926, G604-I926, I605-I926, I606-I926, F607-I926, V608-I926, L609-I926, V610-I926, V611-I926, G612-I926, I613-I926, I614-I926, F615-I926, T616-I926, R617-I926, N618-I926, L619-I926, N620-I926, T621-I926, P622-I926, V623-I926, V624-I926, K625-I926, S626-I926, S627-I926, G628-I926, G629-I926, L630-I926, R631-I926, V632-I926, C633-I926, Y634-I926, V635-I926, I636-I926, L637-I926, L638-I926, C639-I926, H640-I926, F641-I926, L642-I926, N643-I926, F644-I926, A645-I926, S646-I926, T647-I926, S648-I926, F649-I926, F650-I926, I651-I926, G652-I926, E653-I926, P654-I926, Q655-I926, D656-I926, F657-I926, T658-I926, C659-I926, K660-I926, T661-I926, R662-I926, Q663-I926, T664-I926, M665-I926, F666-I926, G667-I926, V668-I926, S669-I926, F670-I926, T671-I926, L672-I926, C673-I926, I674-I926, S675-I926, C676-I926, I677-I926, L678-I926, T679-I926, K680-I926, S681-I926, L682-I926, K683-I926, I684-I926, L685-I926, L686-I926, A687-I926, F688-I926, S689-I926, F690-I926, D691-I926, P692-I926, K693-I926, L694-I926, Q695-I926, K696-I926, F697-I926, L698-I926, K699-I926, C700-I926, L701-I926, Y702-I926, R703-I926, P704-I926, I705-I926, L706-I926, I707-I926, I708-I926, F709-I926, T710-I926, C711-I926, T712-I926, G713-I926, I714-I926, Q715-I926, V716-I926, V717-I926, I718-I926, C719-I926, T720-I926, L721-I926, W722-I926, L723-I926, I724-I926, F725-I926, A726-I926, A727-I926, P728-I926, T729-I926, V730-I926, E731-I926, V732-I926, N733-I926, V734-I926, S735-I926, L736-I926, P737-I926, R738-I926, V739-I926, I740-I926, I741-I926, L742-I926, E743-I926, C744-I926, E745-I926, E746-I926, G747-I926, S748-I926, I749-I926, L750-I926, A751-I926, F752-I926, G753-I926, T754-I926, M755-I926, L756-I926, G757-I926, Y758-I926, I759-I926, A760-I926, I761-I926, L762-I926, A763-I926, F764-I926, I765-I926, C766-I926, F767-I926, I768-I926, F769-I926, A770-I926, F771-I926, K772-I926, G773-I926, K774-I926, Y775-I926, E776-I926, N777-I926, Y778-I926, N779-I926, E780-I926, A781-I926, K782-I926, F783-I926, I784-I926, T785-I926, F786-I926, G787-I926, M788-I926, L789-I926, I790-I926, Y791-I926, F792-I926, I793-I1926, A794-I926, W795-I926, I796-I926, T797-I926, F798-I926, I799-I926, P800-I926, I801-I926, Y802-I926, A803-I926, T804-I926, T805-I926, F806-I926, G807-I926, K808-I926, Y809-I926, V810-I926, P811-I926, A812-I926, V813-I926, E814-I926, I815-I926, I816-I926, V817-I926, I818-I926, L819-I926, I820-I926, S821-I926, N822-I926, Y823-I926, G824-I926, 1825-I926, L826-I926, Y827-I926, C828-I926, T829-I926, F830-I926, I831-I926, P832-I926, K833-I926, C834-I926, Y835-I926, V836-I926, I837-I926, I838-I926, C839-I926, K840-I926, Q841-I926, E842-I926, I843-I926, N844-I926, T845-I926, K846-I926, S847-I926, A848-I926, F849-I926, L850-I926, K851-I926, M852-I926, I853-I926, Y854-I926, S855-I926, Y856-I926, S857-I926, S858-I926, H859-I926, S860-I926, V861-I926, S862-I926, S863-I926, I864-I926, A865-I926, L866-I926, S867-I926, P868-I926, A869-I926, S870-I926, L871-I926, D872-I926, S873-I926, M874-I926, S875-I926, G876-I926, N877-I926, V878-I926, T879-I926, M880-I926, T881-I926, N882-T926, P883-I926, S884-I926, S885-I926, S886-I926, G887-I926, K888-I926, S889-I926, A890-I926, T891-I926, W892-I926, Q893-I926, K894-I926, S895-I926, K896-I926, D897-I926, L898-I926, Q899-I926, A900-I926, Q901-I926, A902-I926, F903-I926, A904-I926, H905-I926, I906-I926, C907-I926, R908-I926, E909-I926, N910-I926, A911-I926, T912-I926, S913-I926, V914-I926, S915-I926, K916-I926, T917-I926, L918-I926, P919-I926, and/or R920-I926 of SEQ ID NO:20. Polynucleotide sequences encoding these polypeptides are also provided. The present invention also encompasses the use of these N-terminal HGPRBMY44 deletion polypeptides as immunogenic and/or antigenic epitopes as described elsewhere herein.

[0653] In preferred embodiments, the following C-terminal HGPRBMY44 deletion polypeptides are encompassed by the present invention: M1-I926, M1-S925, M1-S924, M1-M923, M1-R922, M1-K921, M1-R920, M1-P919, M1-L918, M1-T917, M1-K916, M1-S915, M1-V914, M1-S913, M1-T912, M1-A911, M1-N910, M1-E909, M1-R908, M1-C907, M1-I906, M1-H905, M1-A904, M1-F903, M1-A902, M1-Q901, M1-A900, M1-Q899, M1-L898, M1-D897, M1-K896, M1-S895, M1-K894, M1-Q893, M1-W892, M1-T891, M1-A890, M1-S889, M1-K888, M1-G887, M1-S886, M1-S885, M1-S884, M1-P883, M1-N882, M1-T881, M1-M880, M1-T879, M1-V878, M1-N877, M1-G876, M1-S875, M1-M874, M1-S873, M1-D872, M1-L871, M1-S870, M1-A869, M1-P868, M1-S867, M1-L866, M1-A865, M1-I864, M1-S863, M1-S862, M1-V861, M1-S860, M1-H859, M1-S858, M1-S857, M1-Y856, M1-S855, M1-Y854, M1-I853, M1-M852, M1-K851, M1-L850, M1-F849, M1-A848, M1-S847, M1-K846, M1-T845, M1-N844, M1-I843, M1-E842, M1-Q841, M1-K840, M1-C839, M1-I838, M1-I837, M1-V836, M1-Y835, M1-C834, M1-K833, M1-P832, M1-I831, M1-F830, M1-T829, M1-C828, M1-Y827, M1-L826, M1-I825, M1-G824, M1-Y823, M1-N822, M1-S821, M1-I820, M1-L819, M1-I818, M1-V817, M1-I816, M1-I815, M1-E814, M1-V813, M1-A812, M1-P811, M1-V810, M1-Y809, M1-K808, M1-G807, M1-F806, M1-T805, M1-T804, M1-A803, M1-Y802, M1-I801, M1-P800, M1-I799, M1-F798, M1-T797, M1-I796, M1-W795, M1-A794, M1-I793, M1-F792, M1-Y791, M1-I790, M1-L789, M1-M788, M1-G787, M1-F786, M1-T785, M1-I784, M1-F783, M1-K782, M1-A781, M1-E780, M1-N779, M1-Y778, M1-N777, M1-E776, M1-Y775, M1-K774, M1-G773, M1-K772, M1-F771, M1-A770, M1-F769, M1-I768, M1-F767, M1-C766, M1-I765, M1-F764, M1-A763, M1-L762, M1-I761, M1-A760, M1-I759, M1-Y758, M1-G757, M1-L756, M1-M755, M1-T754, M1-G753, M1-F752, M1-A751, M1-L750, M1-I749, M1-S748, M1-G747, M1-E746, M1-E745, M1-C744, M1-E743, M1-L742, M1-I741, M1-I740, M1-V739, M1-R738, M1-P737, M1-L736, M1-S735, M1-V734, M1-N733, M1-V732, M1-E731, M1-V730, M1-T729, M1-P728, M1-A727, M1-A726, M1-F725, M1-I724, M1-L723, M1-W722, M1-L721, M1-T720, M1-C719, M1-I718, M1-V717, M1-V716, M1-Q715, M1-I714, M1-G713, M1-T712, M1-C711, M1-T710, M1-F709, M1-I708, M1-I707, M1-L706, M1-I705, M1-P704, M1-R703, M1-Y702, M1-L701, M1-C700, M1-K699, M1-L698, M1-F697, M1-K696, M1-Q695, M1-L694, M1-K693, M1-P692, M1-D691, M1-F690, M1-S689, M1-F688, M1-A687, M1-L686, M1-L685, M1-I684, M1-K683, M1-L682, M1-S681, M1-K680, M1-T679, M1-L678, M1-I677, M1-C676, M1-S675, M1-I674, M1-C673, M1-L672, M1-T671, M1-F670, M1-S669, M1-V668, M1-G667, M1-F666, M1-M665, M1-T664, M1-Q663, M1-R662, M1-T661, M1-K660, M1-C659, M1-T658, M1-F657, M1-D656, M1-Q655, M1-P654, M1-E653, M1-G652, M1-I651, M1-F650, M1-F649, M1-S648, M1-T647, M1-S646, M1-A645, M1-F644, M1-N643, M1-L642, M1-F641, M1-H640, M1-C639, M1-L638, M1-L637, M1-I636, M1-V635, M1-Y634, M1-C633, M1-V632, M1-R631, M1-L630, M1-G629, M1-G628, M1-S627, M1-S626, M1-K625, M1-V624, M1-V623, M1-P622, M1-T621, M1-N620, M1-L619, M1-N618, M1-R617, M1-T616, M1-F615, M1-I614, M1-I613, M1-G612, M1-V611, M1-V610, M1-L609, M1-V608, M1-F607, M1-I606, M1-I605, M1-G604, M1-L603, M1-L602, M1-S601, M1-L600, M1-I599, M1-L598, M1-L597, M1-L596, M1-I595, M1-A594, M1-L593, M1-S592, M1-D591, M1-N590, M1-W589, M1-N588, M1-L587, M1-Y586, M1-E585, M1-V584, M1-E583, M1-K582, M1-E581, M1-F580, M1-C579, M1-M578, M1-T577, M1-S576, M1-R575, M1-V574, M1-P573, M1-A572, M1-W571, M1-H570, M1-T569, M1-K568, M1-N567, M1-N566, M1-C565, M1-L564, M1-L563, M1-C562, M1-H561, M1-P560, M1-M559, M1-D558, M1-T557, M1-Q556, M1-N555, M1-T554, M1-Y553, M1-H552, M1-N551, M1-E550, M1-P549, M1-C548, M1-N547, M1-Q546, M1-C545, M1-E544, M1-Y543, M1-C542, M1-C541, M1-I540, M1-H539, M1-Q538, M1-S537, M1-R536, M1-T535, M1-T534, M1-K533, M1-K532, M1-M531, M1-Q530, M1-G529, M1-P528, M1-S527, M1-C526, M1-E525, M1-K524, M1-S523, M1-C522, M1-K521, M1-S520, M1-Q519, M1-I518, M1-Q517, M1-K516, M1-L515, M1-N514, M1-R513, M1-F512, M1-E511, M1-N510, M1-K509, M1-T508, M1-E507, M1-Q506, M1-D505, M1-P504, M1-I503, M1-I502, M1-F501, M1-V500, M1-D499, M1-N498, M1-Q497, M1-L496, M1-D495, M1-Y494, M1-E493, M1-A492, M1-M491, M1-K490, M1-T489, M1-V488, M1-T487, M1-M486, M1-H485, M1-G484, M1-N483, M1-I482, M1-E481, M1-K480, M1-W479, M1-L478, M1-V477, M1-V476, M1-D475, M1-Y474, M1-G473, M1-T472, M1-N471, M1-L470, M1-D469, M1-G468, M1-H467, M1-A466, M1-D465, M1-F464, M1-H463, M1-F462, M1-S461, M1-N460, M1-W459, M1-G458, M1-D457, M1-T456, M1-F455, M1-T454, M1-V453, M1-N452, M1-K451, M1-L450, M1-V449, M1-G448, M1-L447, M1-V446, M1-E445, M1-W444, M1-P443, M1-Q442, M1-F441, M1-A440, M1-N439, M1-P438, M1-N437, M1-Q436, M1-C435, M1-D434, M1-R433, M1-A432, M1-Q431, M1-C430, M1-L429, M1-D428, M1-R427, M1-I426, M1-A425, M1-Y424, M1-G423, M1-L422, M1-A421, M1-F420, M1-V419, M1-A418, M1-L417, M1-Q416, M1-I415, M1-S414, M1-H413, M1-I412, M1-L411, M1-G410, M1-P409, M1-E408, M1-A407, M1-Y406, M1-D405, M1-W404, M1-L403, M1-F402, M1-D401, M1-N400, M1-R399, M1-M398, M1-V397, M1-F396, M1-N395, M1-R394, M1-E393, M1-I392, M1-A391, M1-K390, M1-N389, M1-A388, M1-K387, M1-Y386, M1-A385, M1-L384, M1-T383, M1-R382, M1-Q381, M1-S380, M1-H379, M1-N378, M1-F377, M1-I376, M1-C375, M1-Q374, M1-S373, M1-L372, M1-D371, M1-T370, M1-D369, M1-K368, M1-V367, M1-Y366, M1-A365, M1-C364, M1-A363, M1-S362, M1-L361, M1-H360, M1-M359, M1-A358, M1-Y357, M1-E356, M1-H355, M1-L354, M1-L353, M1-K352, M1-H351, M1-S350, M1-D349, M1-S348, M1-P347, M1-L346, M1-L345, M1-H344, M1-L343, M1-N342, M1-Q341, M1-L340, M1-F339, M1-S338, M1-H337, M1-F336, M1-S335, M1-S334, M1-I333, M1-N332, M1-G331, M1-R330, M1-R329, M1-F328, M1-A327, M1-F326, M1-G325, M1-V324, M1-V323, M1-K322, M1-G321, M1-I320, M1-K319, M1-K318, M1-V317, M1-N316, M1-P315, M1-I314, M1-T313, M1-T312, M1-I311, M1-K310, M1-T309, M1-A308, M1-T307, M1-S306, M1-W305, M1-N304, M1-D303, M1-S302, M1-A301, M1-I300, M1-W299, M1-M298, M1-K297, M1-N296, M1-I295, M1-N294, M1-M293, M1-E292, M1-I291, M1-A290, M1-K289, M1-N288, M1-F287, M1-L286, M1-D285, M1-F284, M1-V283, M1-H282, M1-F281, M1-Q280, M1-R279, M1-L278, M1-F277, M1-V276, M1-V275, M1-I274, M1-V273, M1-N272, M1-V271, M1-Q270, M1-A269, M1-E268, M1-L267, M1-I266, M1-I265, M1-K264, M1-K263, M1-L262, M1-T261, M1-R260, M1-N259, M1-I258, M1-R257, M1-V256, M1-E255, M1-I254, M1-T253, M1-N252, M1-D251, M1-S250, M1-L249, M1-F248, M1-A247, M1-P246, M1-L245, M1-V244, M1-E243, M1-K242, M1-F241, M1-A240, M1-I239, M1-C238, M1-V237, M1-N236, M1-N235, M1-A234, M1-E233, M1-A232, M1-Q231, M1-I230, M1-I229, M1-F228, M1-T227, M1-N226, M1-L225, M1-A224, M1-L223, M1-R222, M1-G221, M1-Y220, M1-D219, M1-D218, M1-D217, M1-T216, M1-T215, M1-I214, M1-I213, M1-G212, M1-I211, M1-W210, M1-N209, M1-W208, M1-G207, M1-S206, M1-K205, M1-Q204, M1-I203, M1-L202, M1-H201, M1-A200, M1-M199, M1-A198, M1-K197, M1-I196, M1-Q195, M1-H194, M1-F193, M1-D192, M1-S191, M1-P190, M1-V189, M1-T188, M1-R187, M1-L186, M1-F185, M1-S184, M1-P183, M1-F182, M1-R181, M1-I180, M1-K179, M1-D178, M1-S177, M1-L176, M1-I175, M1-E174, M1-A173, M1-T172, M1-S171, M1-E170, M1-Y169, M1-G168, M1-V167, M1-Q166, M1-P165, M1-M164, M1-L163, M1-Q162, M1-L161, M1-N160, M1-L159, M1-M158, M1-R157, M1-S156, M1-V155, M1-A154, M1-M153, M1-T152, M1-I151, M1-E150, M1-S149, M1-Y148, M1-G147, M1-S146, M1-G145, M1-I144, M1-V143, M1-A142, M1-K141, M1-V140, M1-R139, M1-P138, M1-M137, M1-Y136, M1-S135, M1-S134, M1-Y133, M1-D132, M1-C131, M1-K130, M1-F129, M1-E128, M1-V127, M1-T126, M1-E125, M1-R124, M1-S123, M1-C122, M1-N121, M1-F120, M1-K119, M1-S118, M1-L117, M1-F116, M1-R115, M1-L114, M1-T113, M1-A112, M1-A111, M1-M110, M1-A109, M1-V108, M1-T107, M1-V106, M1-E105, M1-T104, M1-C103, M1-T102, M1-D101, M1-Y100, M1-I99, M1-E98, M1-Y97, M1-G96, M1-L95, M1-K94, M1-V93, M1-G92, M1-P91, M1-L90, M1-L89, M1-T88, M1-S87, M1-N86, M1-N85, M1-I84, M1-M83, M1-E82, M1-I81, M1-S80, M1-H79, M1-I78, M1-M77, M1-A76, M1-L75, M1-T74, M1-Q73, M1-L72, M1-F71, M1-V70, M1-S69, M1-I68, M1-E67, M1-F66, M1-G65, M1-V64, M1-C63, M1-E62, M1-Q61, M1-I60, M1-Q59, M1-P58, M1-R57, M1-R56, M1-P55, M1-S54, M1-D53, M1-E52, M1-S51, M1-S50, M1-L49, M1-M48, M1-K47, M1-E46, M1-H45, M1-I44, M1-A43, M1-F42, M1-L41, M1-G40, M1-G39, M1-I38, M1-I37, M1-I36, M1-H35, M1-G34, M1-P33, M1-S32, M1-T31, M1-A30, M1-A29, M1-V28, M1-F27, M1-D26, M1-D25, M1-P24, M1-T23, M1-Q22, M1-C21, M1-P20, M1-Q19, M1-S18, M1-T17, M1-A16, M1-L15, M1-I14, M1-I13, M1-V2, M1-F11, M1-C10, M1-T9, M1-I8, and/or M1-L7 of SEQ ID NO:20. Polynucleotide sequences encoding these polypeptides are also provided. The present invention also encompasses the use of these C-terminal HGPRBMY44 deletion polypeptides as immunogenic and/or antigenic epitopes as described elsewhere herein.

[0654] Alternatively, preferred polypeptides of the present invention may comprise polypeptide sequences corresponding to, for example, internal regions of the HGPRBMY44 polypeptide (e.g., any combination of both N- and C-terminal HGPRBMY44 polypeptide deletions) of SEQ ID NO:20. For example, internal regions could be defined by the equation: amino acid NX to amino acid CX, wherein NX refers to any N-terminal deletion polypeptide amino acid of HGPRBMY44 (SEQ ID NO:20), and where CX refers to any C-terminal deletion polypeptide amino acid of HGPRBMY44 (SEQ ID NO:20). Polynucleotides encoding these polypeptides are also provided. The present invention also encompasses the use of these polypeptides as an immunogenic and/or antigenic epitope as described elsewhere herein.

[0655] The present invention also encompasses immunogenic and/or antigenic epitopes of the HGPRBMY44 polypeptide.

[0656] The HGPRBMY44 polypeptides of the present invention were determined to comprise several phosphorylation sites based upon the Motif algorithm (Genetics Computer Group, Inc.). The phosphorylation of such sites may regulate some biological activity of the HGPRBMY44 polypeptide. For example, phosphorylation at specific sites may be involved in regulating the proteins ability to associate or bind to other molecules (e.g., proteins, ligands, substrates, DNA, etc.). In the present case, phosphorylation may modulate the ability of the HGPRBMY44 polypeptide to associate with other polypeptides, particularly cognate ligand for HGPRBMY44, or its ability to modulate certain cellular signal pathways.

[0657] The HGPRBMY44 polypeptide was predicted to comprise ten PKC phosphorylation sites using the Motif algorithm (Genetics Computer Group, Inc.). In vivo, protein kinase C exhibits a preference for the phosphorylation of serine or threonine residues. The PKC phosphorylation sites have the following consensus pattern: [ST]-x-[RK], where S or T represents the site of phosphorylation and ‘x’ an intervening amino acid residue. Additional information regarding PKC phosphorylation sites can be found in Woodget J. R., Gould K. L., Hunter T., Eur. J. Biochem. 161:177-184(1986), and Kishimoto A., Nishiyama K., Nakanishi H., Uratsuji Y., Nomura H., Takeyama Y., Nishizuka Y., J. Biol. Chem. 260:12492-12499(1985); which are hereby incorporated by reference herein.

[0658] In preferred embodiments, the following PKC phosphorylation site polypeptides are encompassed by the present invention: LSSEDSPRRPQIQ (SEQ ID NO:414), VAMAATLRFLSKF (SEQ ID NO:415), TAEILSDKIRFPS (SEQ ID NO:416), VRINRTLKKIILE (SEQ ID NO:417), LLPSDSHKLLHEY (SEQ ID NO:418), CIFNHSQRTLAYK (SEQ ID NO:419), GQMKKTTRSQHIC (SEQ ID NO:420), EPQDFTCKTRQTM (SEQ ID NO:421), CILTKSLKILLAF (SEQ ID NO:422), and/or TNPSSSGKSATWQ (SEQ ID NO:423). Polynucleotides encoding these polypeptides are also provided. The present invention also encompasses the use of the HGPRBMY44 PKC phosphorylation site polypeptides as immunogenic and/or antigenic epitopes as described elsewhere herein.

[0659] The HGPRBMY44 polypeptide was predicted to comprise three casein kinase II phosphorylation sites using the Motif algorithm (Genetics Computer Group, Inc.). Casein kinase II (CK-2) is a protein serine/threonine kinase whose activity is independent of cyclic nucleotides and calcium. CK-2 phosphorylates many different proteins. The substrate specificity [1] of this enzyme can be summarized as follows: (1) Under comparable conditions Ser is favored over Thr.; (2) An acidic residue (either Asp or Glu) must be present three residues from the C-terminal of the phosphate acceptor site; (3) Additional acidic residues in positions +1, +2, +4, and +5 increase the phosphorylation rate. Most physiological substrates have at least one acidic residue in these positions; (4) Asp is preferred to Glu as the provider of acidic determinants; and (5) A basic residue at the N-terminal of the acceptor site decreases the phosphorylation rate, while an acidic one will increase it.

[0660] A consensus pattern for casein kinase II phosphorylations site is as follows: [ST]-x(2)-[DE], wherein ‘x’ represents any amino acid, and S or T is the phosphorylation site.

[0661] Additional information specific to casein kinase II phosphorylation site-II domains may be found in reference to the following publication: Pinna L. A., Biochim. Biophys. Acta 1054:267-284(1990); which is hereby incorporated herein in its entirety.

[0662] In preferred embodiments, the following casein kinase II phosphorylation site polypeptide is encompassed by the present invention: SQPCQTPDDFVAAT (SEQ ID NO:424), HEKMLSSEDSPRRP (SEQ ID NO:425), YEIYDTCTEVTVAM (SEQ ID NO:426), QVGYESTAEILSDK (SEQ ID NO:427), WIGIITTDDDYGRL (SEQ ID NO:428), IGIITTDDDYGRLA (SEQ ID NO:429), VLKNVTFTDGWNSF (SEQ ID NO:430), HGDLNTGYDVVLWK (SEQ ID NO:431), and/or IPDQETKNEFRNLK (SEQ ID NO:432). Polynucleotides encoding these polypeptides are also provided. The present invention also encompasses the use of this casein kinase II phosphorylation site polypeptide as an immunogenic and/or antigenic epitope as described elsewhere herein.

[0663] The HGPRBMY44 polypeptide was predicted to comprise two cAMP- and cGMP-dependent protein kinase phosphorylation site using the Motif algorithm (Genetics Computer Group, Inc.). There has been a number of studies relative to the specificity of cAMP- and cGMP-dependent protein kinases. Both types of kinases appear to share a preference for the phosphorylation of serine or threonine residues found close to at least two consecutive N-terminal basic residues.

[0664] A consensus pattern for cAMP- and cGMP-dependent protein kinase phosphorylation sites is as follows: [RK](2)-x-[ST], wherein “x” represents any amino acid, and S or T is the phosphorylation site.

[0665] Additional information specific to cAMP- and cGMP-dependent protein kinase phosphorylation sites may be found in reference to the following publication: Fremisco J. R., Glass D. B., Krebs E. G, J. Biol. Chem. 255:4240-4245(1980); Glass D. B., Smith S. B., J. Biol. Chem. 258:14797-14803(1983); and Glass D. B., El-Maghrabi M. R., Pilkis S. J., J. Biol. Chem. 261:2987-2993(1986); which is hereby incorporated herein in its entirety.

[0666] In preferred embodiments, the following cAMP- and cGMP-dependent protein kinase phosphorylation site polypeptide is encompassed by the present invention: SPGQMKKTTRSQHI (SEQ ID NO:433), and/or KTLPRKRMSSI (SEQ ID NO:434). Polynucleotides encoding this polypeptide are also provided. The present invention also encompasses the use of this cAMP- and cGMP-dependent protein kinase phosphorylation site polypeptide as an immunogenic and/or antigenic epitope as described elsewhere herein.

[0667] The HGPRBMY44 polypeptide has been shown to comprise fourteen glycosylation sites according to the Motif algorithm (Genetics Computer Group, Inc.). As discussed more specifically herein, protein glycosylation is thought to serve a variety of functions including: augmentation of protein folding, inhibition of protein aggregation, regulation of intracellular trafficking to organelles, increasing resistance to proteolysis, modulation of protein antigenicity, and mediation of intercellular adhesion.

[0668] Asparagine glycosylation sites have the following consensus pattern, N-{P}-[ST]-{P}, wherein N represents the glycosylation site. However, it is well known that that potential N-glycosylation sites are specific to the consensus sequence Asn-Xaa-Ser/Thr. However, the presence of the consensus tripeptide is not sufficient to conclude that an asparagine residue is glycosylated, due to the fact that the folding of the protein plays an important role in the regulation of N-glycosylation. It has been shown that the presence of proline between Asn and Ser/Thr will inhibit N-glycosylation; this has been confirmed by a recent statistical analysis of glycosylation sites, which also shows that about 50% of the sites that have a proline C-terminal to Ser/Thr are not glycosylated. Additional information relating to asparagine glycosylation may be found in reference to the following publications, which are hereby incorporated by reference herein: Marshall R. D., Annu. Rev. Biochem. 41:673-702(1972); Pless D. D., Lennarz W. J., Proc. Natl. Acad. Sci. U.S.A. 74:134-138(1977); Bause E., Biochem. J. 209:331-336(1983); Gavel Y., von Heijne G., Protein Eng. 3:433-442(1990); and Miletich J. P., Broze G. J. Jr., J. Biol. Chem. 265:11397-11404(1990).

[0669] In preferred embodiments, the following asparagine glycosylation site polypeptides are encompassed by the present invention: SIEMINNSTLLPGV (SEQ ID NO:435), IEMINNSTLLPGVK (SEQ ID NO:436), FLSKFNCSRETVEF (SEQ ID NO:437), IEVRINRTLKKIIL (SEQ ID NO:438), WIASDNWSTATKIT (SEQ ID NO:439), AFRRGNISSFHSFL (SEQ ID NO:440), SQCIFNHSQRTLAY (SEQ ID NO:441), LGVLKNVTFTDGWN (SEQ ID NO:442), ENHYTNQTDMPHCL (SEQ ID NO:443), CLLCNNKTHWAPVR (SEQ ID NO:444), EYLNWNDSLAILLL (SEQ ID NO:445), PTVEVNVSLPRVII (SEQ ID NO:446), DSMSGNVTMTNPSS (SEQ ID NO:447), and/or HICRENATSVSKTL (SEQ ID NO:448). Polynucleotides encoding these polypeptides are also provided. The present invention also encompasses the use of these HGPRBMY44 asparagine glycosylation site polypeptide as immunogenic and/or antigenic epitopes as described elsewhere herein.

[0670] The HGPRBMY44 polypeptide was predicted to comprise seven N-myristoylation sites using the Motif algorithm (Genetics Computer Group, Inc.). An appreciable number of eukaryotic proteins are acylated by the covalent addition of myristate (a C14-saturated fatty acid) to their N-terminal residue via an amide linkage. The sequence specificity of the enzyme responsible for this modification, myristoyl CoA:protein N-myristoyl transferase (NMT), has been derived from the sequence of known N-myristoylated proteins and from studies using synthetic peptides. The specificity seems to be the following: i.) The N-terminal residue must be glycine; ii.) In position 2, uncharged residues are allowed; iii.) Charged residues, proline and large hydrophobic residues are not allowed; iv.) In positions 3 and 4, most, if not all, residues are allowed; v.) In position 5, small uncharged residues are allowed (Ala, Ser, Thr, Cys, Asn and Gly). Serine is favored; and vi.) In position 6, proline is not allowed.

[0671] A consensus pattern for N-myristoylation is as follows: G-{EDRKHPFYW}-x(2)-[STAGCN]-{P}, wherein ‘x’ represents any amino acid, and G is the N-myristoylation site.

[0672] Additional information specific to N-myristoylation sites may be found in reference to the following publication: Towler D. A., Gordon J. T., Adams S. P., Glaser L., Annu. Rev. Biochem. 57:69-99(1988); and Grand R. J. A., Biochem. J. 258:625-638(1989); which is hereby incorporated herein in its entirety.

[0673] In preferred embodiments, the following N-myristoylation site polypeptides are encompassed by the present invention: GHIIIGGLFAIHEKML (SEQ ID NO:449), STLLPGVKLGYEIYDT (SEQ ID NO:450), VKAVIGSGYSEITMAV (SEQ ID NO:451), GWNWIGIITTDDDYGR (SEQ ID NO:452), FAFRRGNISSFHSFLQ (SEQ ID NO:453), DYAEPGLIHSIQLAVF (SEQ ID NO:454), PWEVLGVLKNVTFTDG (SEQ ID NO:455), FVLVVGIIFTRNLNTP (SEQ ID NO:456), VKSSGGLRVCYVILLC (SEQ ID NO:457), RQTMFGVSFTLCISCI (SEQ ID NO:458), LECEEGSILAFGTMLG (SEQ ID NO:459), SILAFGTMLGYIAILA (SEQ ID NO:460), and/or LISNYGILYCTFIPKC (SEQ ID NO:461). Polynucleotides encoding these polypeptides are also provided. The present invention also encompasses the use of these N-myristoylation site polypeptides as immunogenic and/or antigenic epitopes as described elsewhere herein.

[0674] Moreover, in confirmation of HGPRBMY44 representing a novel GPCR, the HGPRBMY44 polypeptide was predicted to comprise a G-protein coupled receptor motif using the Motif algorithm (Genetics Computer Group, Inc.). G-protein coupled receptors (also called R7G) are an extensive group of hormones, neurotransmitters, odorants and light receptors which transduce extracellular signals by interaction with guanine nucleotide-binding (G) proteins. Some examples of receptors that belong to this family are provided as follows: 5-hydroxytryptamine (serotonin) 1A to 1F, 2A to 2C, 4, 5A, 5B, 6 and 7, Acetylcholine, muscarinic-type, M1 to M5, Adenosine A1, A2A, A2B and A3, Adrenergic alpha-1A to -1C; alpha-2A to -2D; beta-1 to -3, Angiotensin II types I and II, Bombesin subtypes 3 and 4, Bradykinin B1 and B2, c3a and C5a anaphylatoxin, Cannabinoid CB1 and CB2, Chemokines C-C CC-CKR-1 to CC-CKR-8, Chemokines C-X-C CXC-CKR-1 to CXC-CKR-4, Cholecystokinin-A and cholecystokinin-B/gastrin, Dopamine D1 to D5, Endothelin ET-a and ET-b, fMet-Leu-Phe (fMLP) (N-formyl peptide), Follicle stimulating hormone (FSH-R), Galanin, Gastrin-releasing peptide (GRP-R), Gonadotropin-releasing hormone (GNRH-R), Histamine H1 and H2 (gastric receptor I), Lutropin-choriogonadotropic hormone (LSH-R), Melanocortin MC1R to MC5R, Melatonin, Neuromedin B (NMB-R), Neuromedin K (NK-3R), Neuropeptide Y types 1 to 6, Neurotensin (NT-R), Octopamine (tyramine) from insects, Odorants, Opioids delta-, kappa- and mu-types, Oxytocin (OT-R), Platelet activating factor (PAF-R), Prostacyclin, Prostaglandin D2, Prostaglandin E2, EP1 to EP4 subtypes, Prostaglandin F2, Purinoreceptors (ATP), Somatostatin types 1 to 5, Substance-K (NK-2R), Substance-P (NK-1R), Thrombin, Thromboxane A2, Thyrotropin (TSH-R), Thyrotropin releasing factor (TRH-R), Vasopressin V1a, V1b and V2, Visual pigments (opsins and rhodopsin), Proto-oncogene mas, Caenorhabditis elegans putative receptors C06G4.5, C38C10.1, C43C3.2,T27D1.3 and ZC84.4, Three putative receptors encoded in the genome of cytomegalovirus: US27, US28, and UL33., ECRF3, a putative receptor encoded in the genome of herpesvirus saimiri.

[0675] The structure of all GPCRs are thought to be identical. They have seven hydrophobic regions, each of which most probably spans the membrane. The N-terminus is located on the extracellular side of the membrane and is often glycosylated, while the C-terminus is cytoplasmic and generally phosphorylated. Three extracellular loops alternate with three intracellular loops to link the seven transmembrane regions. Most, but not all of these receptors, lack a signal peptide. The most conserved parts of these proteins are the transmembrane regions and the first two cytoplasmic loops. A conserved acidic-Arg-aromatic triplet is present in the N-terminal extremity of the second cytoplasmic loop and could be implicated in the interaction with G proteins.

[0676] The putative consensus sequence for GPCRs comprises the conserved triplet and also spans the major part of the third transmembrane helix, and is as follows:

[GSTALIVMFYWC]-[GSTANCPDE]-{EDPKRH}-x(2)-[LIVMNQGA]-x(2)-[LIVMFT]-[GSTANC]-[LIVMFYWSTAC]-[DENH]-R-[FYWCSH]-x(2)-[LIVM],

[0677] where “X” represents any amino acid.

[0678] Additional information relating to G-protein coupled receptors may be found in reference to the following publications: Strosberg A. D., Eur. J. Biochem. 196:1-10(1991); Kerlavage A. R., Curr. Opin. Struct. Biol. 1:394-401(1991); Probst W. C., Snyder L. A., Schuster D. I., Brosius J., Sealfon S. C., DNA Cell Biol. 11:1-20(1992); Savarese T. M., Fraser C. M., Biochem. J. 283:1-9(1992); Branchek T., Curr. Biol. 3:315-317(1993); Stiles G. L., J. Biol. Chem. 267:6451-6454(1992); Friell T., Kobilka B. K., Lefkowitz R. J., Caron M. G., Trends Neurosci. 11:321-324(1988); Stevens C. F., Curr. Biol. 1:20-22(1991); Sakurai T., Yanagisawa M., Masaki T., Trends Pharmacol. Sci. 13:103-107(1992); Salesse R., Remy J. J., Levin J. M., Jallal B., Garnier J., Biochimie 73:109-120(1991); Lancet D., Ben-Arie N., Curr. Biol. 3:668-674(1993); Uhl G. R., Childers S., Pasternak G., Trends Neurosci. 17:89-93(1994); Barnard E. A., Burnstock G., Webb T. E., Trends Pharmacol. Sci. 15:67-70(1994); Applebury M. L., Hargrave P. A., Vision Res. 26:1881-1895(1986); Attwood T. K., Eliopoulos E. E., Findlay J. B. C., Gene 98:153-159(1991); http://www.gcrdb.uthscsa.edu/; and http://swift.embl-heidelberg.de/7tm/.

[0679] In preferred embodiments, the following G-protein coupled receptors signature polypeptide is encompassed by the present invention: RSQHICCYECQNCPENHYTNQTDMPHCLLCNNKTH (SEQ ID NO:462). Polynucleotides encoding this polypeptide are also provided. The present invention also encompasses the use of the HGPRBMY44 G-protein coupled receptors signature polypeptide as immunogenic and/or antigenic epitopes as described elsewhere herein.

[0680] Many polynucleotide sequences, such as EST sequences, are publicly available and accessible through sequence databases. Some of these sequences are related to SEQ ID NO:19 and may have been publicly available prior to conception of the present invention. Preferably, such related polynucleotides are specifically excluded from the scope of the present invention. To list every related sequence would be cumbersome. Accordingly, preferably excluded from the present invention are one or more polynucleotides consisting of a nucleotide sequence described by the general formula of a-b, where a is any integer between 1 to 2767 of SEQ ID NO:19, b is an integer between 15 to 2781, where both a and b correspond to the positions of nucleotide residues shown in SEQ ID NO:19, and where b is greater than or equal to a+14

TABLE I

| | | | | | | 5' NT of | | | |
|---|---|---|---|---|---|---|---|---|---|
| | | ATCC | | NT SEQ | Total | Start | | AA Seq | Total |
| Gene | CDNA | Deposit No. | | ID. No. | NT Seq | Codon | 3' NT | ID No. | AA of |
| No. | CloneID | Z and Date | Vector | X | of Clone | of ORF | of ORF | Y | ORF |
| 1. | HGPRBM | XXXXX | pSport1 | 1 | 2592 | 1 | 2589 | 2 | 863 |
| | Y30_1 | Xx/Xx/Xx | | | | | | | |
| | (also | | | | | | | | |
| | referred to | | | | | | | | |
| | as | | | | | | | | |
| | GPCR99 | | | | | | | | |
| | and/or | | | | | | | | |
| | GPCR51 | | | | | | | | |
| | splice | | | | | | | | |
| | variant 1) | | | | | | | | |
| 2. | HGPRBM | XXXXX | PSport1 | 3 | 2490 | 1 | 2487 | 4 | 829 |
| | Y30_2 | Xx/Xx/Xx | | | | | | | |
| | (also | | | | | | | | |
| | referred to | | | | | | | | |
| | as | | | | | | | | |
| | GPCR99 | | | | | | | | |
| | and/or | | | | | | | | |
| | GPCR51 | | | | | | | | |
| | splice | | | | | | | | |
| | variant 2) | | | | | | | | |
| 3. | HGPRBM | XXXXX | PSport1 | 5 | 2685 | 1 | 2682 | 6 | 894 |
| | Y30_3 | Xx/Xx/Xx | | | | | | | |
| | (also | | | | | | | | |
| | referred to | | | | | | | | |
| | as | | | | | | | | |
| | GPCR99 | | | | | | | | |
| | and/or | | | | | | | | |
| | GPCR51 | | | | | | | | |
| | splice | | | | | | | | |
| | variant 2) | | | | | | | | |
| 4. | HGPRBM | PTA-4175 | PSport1 | 7 | 1203 | 1 | 1200 | 8 | 400 |
| | Y41_1 | Mar. 21, 2002 | | | | | | | |
| | (also | | | | | | | | |
| | referred to | | | | | | | | |
| | as GPCR- | | | | | | | | |
| | 169) | | | | | | | | |
| 5. | HGPRBM | XXXXX | PSport1 | 9 | 1650 | 1 | 1647 | 10 | 549 |
| | Y41_2 | Xx/Xx/Xx | | | | | | | |
| | (also | | | | | | | | |
| | referred to | | | | | | | | |
| | as GPCR- | | | | | | | | |
| | 169 splice | | | | | | | | |
| | variant 2) | | | | | | | | |
| 6. | HGPRBM | XXXXX | PSport1 | 11 | 1368 | 1 | 1365 | 12 | 455 |
| | Y41_3 | Xx/Xx/Xx | | | | | | | |
| | (also | | | | | | | | |
| | referred to | | | | | | | | |
| | as GPCR- | | | | | | | | |
| | 169 splice | | | | | | | | |
| | variant 3) | | | | | | | | |
| 7. | HGPRBM | XXXXX | PSport1 | 13 | 1527 | 1 | 1524 | 14 | 508 |
| | Y42 (also | Xx/Xx/Xx | | | | | | | |
| | referred to | | | | | | | | |
| | as GPCR- | | | | | | | | |
| | 148) | | | | | | | | |
| 8. | HGPRBM | XXXXX | PSport1 | 15 | 1197 | 1 | 1194 | 16 | 398 |
| | Y42_1 | Xx/Xx/Xx | | | | | | | |
| | (also | | | | | | | | |
| | referred to | | | | | | | | |
| | as GPCR- | | | | | | | | |
| | 148 splice | | | | | | | | |
| | variant 1) | | | | | | | | |
| 9. | HGPRBM | XXXXX | PSport1 | 17 | 1170 | 1 | 1167 | 18 | 389 |
| | Y43 (also | Xx/Xx/Xx | | | | | | | |
| | referred to | | | | | | | | |
| | as GPCR | | | | | | | | |
| | GPCR96) | | | | | | | | |
| 10. | HGPRBM | XXXXX | pSport1 | 19 | 2781 | 1 | 2778 | 20 | 926 |
| | Y44 (also | Xx/Xx/Xx | | | | | | | |
| | referred to | | | | | | | | |
| | as GPCR- | | | | | | | | |
| | 106) | | | | | | | | |

[0681] Table I summarizes the information corresponding to each “Gene No.” described above. The nucleotide sequence identified as “NT SEQ ID NO:X” was assembled from partially homologous (“overlapping”) sequences obtained from the “cDNA clone ID” identified in Table I and, in some cases, from additional related DNA clones. The overlapping sequences were assembled into a single contiguous sequence of high redundancy (usually several overlapping sequences at each nucleotide position), resulting in a final sequence identified as SEQ ID NO:X.

[0682] The cDNA Clone ID was deposited on the date and given the corresponding deposit number listed in “ATCC Deposit No:Z and Date.” “Vector” refers to the type of vector contained in the cDNA Clone ID.

[0683] “Total NT Seq. Of Clone” refers to the total number of nucleotides in the clone contig identified by “Gene No.” The deposited clone may contain all or most of the sequence of SEQ ID NO:X. The nucleotide position of SEQ ID NO:X of the putative start codon (methionine) is identified as “5′ NT of Start Codon of ORF.”

[0684] The translated amino acid sequence, beginning with the methionine, is identified as “AA SEQ ID NO:Y” although other reading frames can also be easily translated using known molecular biology techniques. The polypeptides produced by these alternative open reading frames are specifically contemplated by the present invention.

[0685] The total number of amino acids within the open reading frame of SEQ ID NO:Y is identified as “Total AA of ORF”.

[0686] SEQ ID NO:X (where X may be any of the polynucleotide sequences disclosed in the sequence listing) and the translated SEQ ID NO:Y (where Y may be any of the polypeptide sequences disclosed in the sequence listing) are sufficiently accurate and otherwise suitable for a variety of uses well known in the art and described further herein. For instance, SEQ ID NO:X is useful for designing nucleic acid hybridization probes that will detect nucleic acid sequences contained in SEQ ID NO:X or the cDNA contained in the deposited clone. These probes will also hybridize to nucleic acid molecules in biological samples, thereby enabling a variety of forensic and diagnostic methods of the invention. Similarly, polypeptides identified from SEQ ID NO:Y may be used, for example, to generate antibodies which bind specifically to proteins containing the polypeptides and the proteins encoded by the cDNA clones identified in Table I.

[0687] Nevertheless, DNA sequences generated by sequencing reactions can contain sequencing errors. The errors exist as misidentified nucleotides, or as insertions or deletions of nucleotides in the generated DNA sequence. The erroneously inserted or deleted nucleotides may cause frame shifts in the reading frames of the predicted amino acid sequence. In these cases, the predicted amino acid sequence diverges from the actual amino acid sequence, even though the generated DNA sequence may be greater than 99.9% identical to the actual DNA sequence (for example, one base insertion or deletion in an open reading frame of over 1000 bases).

[0688] Accordingly, for those applications requiring precision in the nucleotide sequence or the amino acid sequence, the present invention provides not only the generated nucleotide sequence identified as SEQ ID NO:X and the predicted translated amino acid sequence identified as SEQ ID NO:Y, but also a sample of plasmid DNA containing a cDNA of the invention deposited with the ATCC, as set forth in Table I. The nucleotide sequence of each deposited clone can readily be determined by sequencing the deposited clone in accordance with known methods. The predicted amino acid sequence can then be verified from such deposits. Moreover, the amino acid sequence of the protein encoded by a particular clone can also be directly determined by peptide sequencing or by expressing the protein in a suitable host cell containing the deposited cDNA, collecting the protein, and determining its sequence.

[0689] The present invention also relates to the genes corresponding to SEQ ID NO:X, SEQ ID NO:Y, or the deposited clone. The corresponding gene can be isolated in accordance with known methods using the sequence information disclosed herein. Such methods include preparing probes or primers from the disclosed sequence and identifying or amplifying the corresponding gene from appropriate sources of genomic material.

[0690] Also provided in the present invention are species homologs, allelic variants, and/or orthologs. The skilled artisan could, using procedures well-known in the art, obtain the polynucleotide sequence corresponding to full-length genes (including, but not limited to the full-length coding region), allelic variants, splice variants, orthologs, and/or species homologues of genes corresponding to SEQ ID NO:X, SEQ ID NO:Y, or a deposited clone, relying on the sequence from the sequences disclosed herein or the clones deposited with the ATCC. For example, allelic variants and/or species homologues may be isolated and identified by making suitable probes or primers which correspond to the 5′, 3′, or internal regions of the sequences provided herein and screening a suitable nucleic acid source for allelic variants and/or the desired homologue.

[0691] The polypeptides of the invention can be prepared in any suitable manner. Such polypeptides include isolated naturally occurring polypeptides, recombinantly produced polypeptides, synthetically produced polypeptides, or polypeptides produced by a combination of these methods. Means for preparing such polypeptides are well understood in the art.

[0692] The polypeptides may be in the form of the protein, or may be a part of a larger protein, such as a fusion protein (see below). It is often advantageous to include an additional amino acid sequence which contains secretory or leader sequences, pro-sequences, sequences which aid in purification, such as multiple histidine residues, or an additional sequence for stability during recombinant production.

[0693] The polypeptides of the present invention are preferably provided in an isolated form, and preferably are substantially purified. A recombinantly produced version of a polypeptide, can be substantially purified using techniques described herein or otherwise known in the art, such as, for example, by the one-step method described in Smith and Johnson, Gene 67:31-40 (1988). Polypeptides of the invention also can be purified from natural, synthetic or recombinant sources using protocols described herein or otherwise known in the art, such as, for example, antibodies of the invention raised against the full-length form of the protein.

[0694] The present invention provides a polynucleotide comprising, or alternatively consisting of, the sequence identified as SEQ ID NO:X, and/or a cDNA provided in ATCC Deposit No:Z. The present invention also provides a polypeptide comprising, or alternatively consisting of, the sequence identified as SEQ ID NO:Y, and/or a polypeptide encoded by the cDNA provided in ATCC Deposit NO:Z. The present invention also provides polynucleotides encoding a polypeptide comprising, or alternatively consisting of the polypeptide sequence of SEQ ID NO:Y, and/or a polypeptide sequence encoded by the cDNA contained in ATCC Deposit No:Z.

[0695] Preferably, the present invention is directed to a polynucleotide comprising, or alternatively consisting of, the sequence identified as SEQ ID NO:X, and/or a cDNA provided in ATCC Deposit No:Z that is less than, or equal to, a polynucleotide sequence that is 5 mega basepairs, 1 mega basepairs, 0.5 mega basepairs, 0.1 mega basepairs, 50,000 basepairs, 20,000 basepairs, or 10,000 basepairs in length.

[0696] The present invention encompasses polynucleotides with sequences complementary to those of the polynucleotides of the present invention disclosed herein. Such sequences may be complementary to the sequence disclosed as SEQ ID NO:X, the sequence contained in a deposit, and/or the nucleic acid sequence encoding the sequence disclosed as SEQ ID NO:Y.

[0697] The present invention also encompasses polynucleotides capable of hybridizing, preferably under reduced stringency conditions, more preferably under stringent conditions, and most preferably under highly stringent conditions, to polynucleotides described herein. Examples of stringency conditions are shown in Table II below: highly stringent conditions are those that are at least as stringent as, for example, conditions A-F; stringent conditions are at least as stringent as, for example, conditions G-L; and reduced stringency conditions are at least as stringent as, for example, conditions M-R.

TABLE II

| Strin- | | | | |
|---|---|---|---|---|
| gency | Polynu- | Hybrid | Hybridization | Wash |
| Con- | cleotide | Length | Temperature | Temperature |
| dition | Hybrid± | (bp) ‡ | and Buffer† | and Buffer† |
| A | DNA:DNA | > or equal to | 65° C.; 1xSSC - | 65° C.; |
| | | 50 | or −42° C.; 1xSSC, | 0.3xSSC |
| | | | 50% formamide | |
| B | DNA:DNA | <50 | Tb*; 1xSSC | Tb*; 1xSSC |
| C | DNA:RNA | > or equal to | 67° C.; 1xSSC - | 67° C.; |
| | | 50 | or −45° C.; 1xSSC, | 0.3xSSC |
| | | | 50% formamide | |
| D | DNA:RNA | <50 | Td*; 1xSSC | Td*; 1xSSC |
| E | RNA:RNA | > or equal to | 70° C.; 1xSSC - | 70° C.; |
| | | 50 | or −50° C.; 1xSSC, | 0.3xSSC |
| | | | 50% formamide | |
| F | RNA:RNA | <50 | Tf*; 1xSSC | Tf*; 1xSSC |
| G | DNA.DNA | > or equal to | 65° C.; 4xSSC - | 65° C.; 1xSSC |
| | | 50 | or −45° C.; 4xSSC, | |
| | | | 50% formamide | |
| H | DNA:DNA | <50 | Th*; 4xSSC | Th*; 4xSSC |
| I | DNA:RNA | > or equal to | 67° C.; 4xSSC - | 67° C.; 1xSSC |
| | | 50 | or −45° C.; 4xSSC, | |
| | | | 50% formamide | |
| J | DNA:RNA | <50 | Tj*; 4xSSC | Tj*; 4xSSC |
| K | RNA:RNA | > or equal to | 70° C.; 4xSSC - | 67° C.; 1xSSC |
| | | 50 | or −40° C.; 6xSSC, | |
| | | | 50% formamide | |
| L | RNA:RNA | <50 | Tl*; 2xSSC | TI*; 2xSSC |
| M | DNA:DNA | > or equal to | 50° C.; 4xSSC - | 50° C.; 2xSSC |
| | | 50 | or −40° C. 6xSSC, | |
| | | | 50% formamide | |
| N | DNA:DNA | <50 | Tn*; 6xSSC | Tn*; 6xSSC |
| O | DNA:RNA | > or equal to | 55° C.; 4xSSC - | 55° C.; 2xSSC |
| | | 50 | or −42° C.; 6xSSC, | |
| | | | 50% formamide | |
| P | DNA:RNA | <50 | Tp*; 6xSSC | Tp*; 6xSSC |
| Q | RNA:RNA | > or equal to | 60° C.; 4xSSC - | 60° C.; 2xSSC |
| | | 50 | or −45° C.; 6xSSC, | |
| | | | 50% formamide | |
| R | RNA:RNA | <50 | Tr*; 4xSSC | Tr*; 4xSSC |
| ‡ - The “hybrid length” is the anticipated length for the hybridized region(s) of the hybridizing polynucleotides. When hybridizing a polynucleotide of unknown sequence, the hybrid is assumed to be that of the hybridizing polynucleotide of the present invention. When polynucleotides of known sequence are hybridized, the hybrid length can be determined by aligning the sequences of the polynucleotides and | | | | |
| # identifying the region or regions of optimal sequence complementarity. Methods of aligning two or more polynucleotide sequences and/or determining the percent identity between two polynucleotide sequences are well known in the art (e.g., MegAlign program of the DNA*Star suite of programs, etc). | | | | |
| † - SSPE (1xSSPE is 0.15 M NaCl, 10 mM NaH2PO4, and 1.25 mM EDTA, pH 7.4) can be substituted for SSC (1xSSC is 0.15 M NaCl and 15 mM sodium citrate) in the hybridization and wash buffers; washes are performed for 15 minutes after hybridization is complete. The hydridizations and washes may additionally include 5X Denhardt's reagent, .5-1.0% SDS, 100 ug/ml denatured, fragmented salmon sperm DNA, 0.5% sodium pyrophosphate, and up to 50% formamide. | | | | |
| *Tb - Tr: The hybridization temperature for hybrids anticipated to be less than 50 base pairs in length should be 5-10° C. less than the melting temperature Tm of the hybrids there Tm is determined according to the following equations. For hybrids less than 18 base pairs in length, Tm(° C.) = 2(# of A + T bases) + 4(# of G + C bases). For hybrids between 18 and 49 base pairs in length, | | | | |
| # Tm(° C.) = 81.5 + 16.6(log₁₀[Na+]) + 0.41(% G + C) − (600/N), where N is the number of bases in the hybride, and [Na+] is the concentration of sodium ions in the hybridization buffer ([NA+] for 1xSSC = .165 M). | | | | |

± - The present invention encompasses the substitution of any one, or more DNA or RNA hybrid partners with either a PNA, or a modified polynucleotide. Such modified polynucleotides are known in the art and are more particularly described elsewhere herein.

[0698] Additional examples of stringency conditions for polynucleotide hybridization are provided, for example, in Sambrook, J., E. F. Fritsch, and T. Maniatis, 1989, Molecular Cloning: A Laboratory Manual, Cold Spring Harbor Laboratory Press, Cold Spring Harbor, N.Y., chapters 9 and 11, and Current Protocols in Molecular Biology, 1995, F. M., Ausubel et al., eds, John Wiley and Sons, Inc., sections 2.10 and 6.3-6.4, which are hereby incorporated by reference herein.

[0699] Preferably, such hybridizing polynucleotides have at least 70% sequence identity (more preferably, at least 80% identity; and most preferably at least 90% or 95% identity) with the polynucleotide of the present invention to which they hybridize, where sequence identity is determined by comparing the sequences of the hybridizing polynucleotides when aligned so as to maximize overlap and identity while minimizing sequence gaps. The determination of identity is well known in the art, and discussed more specifically elsewhere herein.

[0700] The invention encompasses the application of PCR methodology to the polynucleotide sequences of the present invention, the clone deposited with the ATCC, and/or the cDNA encoding the polypeptides of the present invention. PCR techniques for the amplification of nucleic acids are described in U.S. Pat. No. 4,683,195 and Saiki et al., Science, 239:487-491 (1988). PCR, for example, may include the following steps, of denaturation of template nucleic acid (if double-stranded), annealing of primer to target, and polymerization. The nucleic acid probed or used as a template in the amplification reaction may be genomic DNA, cDNA, RNA, or a PNA. PCR may be used to amplify specific sequences from genomic DNA, specific RNA sequence, and/or cDNA transcribed from mRNA. References for the general use of PCR techniques, including specific method parameters, include Mullis et al., Cold Spring Harbor Symp. Quant. Biol., 51:263, (1987), Ehrlich (ed), PCR Technology, Stockton Press, NY, 1989; Ehrlich et al., Science, 252:1643-1650, (1991); and “PCR Protocols, A Guide to Methods and Applications”, Eds., Innis et al., Academic Press, New York, (1990).

[0701] Polynucleotide and Polypeptide Variants

[0702] The present invention also encompasses variants (e.g., allelic variants, orthologs, etc.) of the polynucleotide sequence disclosed herein in SEQ ID NO:X, the complementary strand thereto, and/or the cDNA sequence contained in the deposited clone.

[0703] The present invention also encompasses variants of the polypeptide sequence, and/or fragments therein, disclosed in SEQ ID NO:Y, a polypeptide encoded by the polynucleotide sequence in SEQ ID NO:X, and/or a polypeptide encoded by a cDNA in the deposited clone.

[0704] “Variant” refers to a polynucleotide or polypeptide differing from the polynucleotide or polypeptide of the present invention, but retaining essential properties thereof. Generally, variants are overall closely similar, and, in many regions, identical to the polynucleotide or polypeptide of the present invention.

[0705] Thus, one aspect of the invention provides an isolated nucleic acid molecule comprising, or alternatively consisting of, a polynucleotide having a nucleotide sequence selected from the group consisting of: (a) a nucleotide sequence encoding a HGPRBMY30_{—}1, HGPRBMY30_{—}2, HGPRBMY30_{—}3, HGPRBMY41_{—}1, HGPRBMY41_{—}2, HGPRBMY41_{—}3, HGPRBMY42, HGPRBMY42_{—}1, HGPRBMY43, and/or HGPRBMY44 related polypeptide having an amino acid sequence as shown in the sequence listing and described in SEQ ID NO:X or the cDNA contained in ATCC deposit No:Z; (b) a nucleotide sequence encoding a mature HGPRBMY30_{—}1, HGPRBMY30_{—}2, HGPRBMY30_{—}3, HGPRBMY41_{—}1, HGPRBMY41_{—}2, HGPRBMY41_{—}3, HGPRBMY42, HGPRBMY42_{—}1, HGPRBMY43, and/or HGPRBMY44 related polypeptide having the amino acid sequence as shown in the sequence listing and described in SEQ ID NO:X or the cDNA contained in ATCC deposit No:Z; (c) a nucleotide sequence encoding a biologically active fragment of a HGPRBMY30_{—}1, HGPRBMY30_{—}2, HGPRBMY30_{—}3, HGPRBMY41_{—}1, HGPRBMY41_{—}2, HGPRBMY41_{—}3, HGPRBMY42, HGPRBMY42_{—}1, HGPRBMY43, and/or HGPRBMY44 related polypeptide having an amino acid sequence shown in the sequence listing and described in SEQ ID NO:X or the cDNA contained in ATCC deposit No:Z; (d) a nucleotide sequence encoding an antigenic fragment of a HGPRBMY30_{—}1, HGPRBMY30_{—}2, HGPRBMY30_{—}3, HGPRBMY41_{—}1, HGPRBMY41_{—}2, HGPRBMY41_{—}3, HGPRBMY42, HGPRBMY42_{—}1, HGPRBMY43, and/or HGPRBMY44 related polypeptide having an amino acid sequence sown in the sequence listing and described in SEQ ID NO:X or the cDNA contained in ATCC deposit No:Z; (e) a nucleotide sequence encoding a HGPRBMY30_{—}1, HGPRBMY30_{—}2, HGPRBMY30_{—}3, HGPRBMY41_{—}1, HGPRBMY41_{—}2, HGPRBMY41_{—}3, HGPRBMY42, HGPRBMY42_{—}1, HGPRBMY43, and/or HGPRBMY44 related polypeptide comprising the complete amino acid sequence encoded by a human cDNA plasmid contained in SEQ ID NO:X or the cDNA contained in ATCC deposit No:Z; (f) a nucleotide sequence encoding a mature HGPRBMY30_{—}1, HGPRBMY30_{—}2, HGPRBMY30_{—}3, HGPRBMY41_{—}1, HGPRBMY41_{—}2, HGPRBMY41_{—}3, HGPRBMY42, HGPRBMY42_{—}1, HGPRBMY43, and/or HGPRBMY44 related polypeptide having an amino acid sequence encoded by a human cDNA plasmid contained in SEQ ID NO:X or the cDNA contained in ATCC deposit No:Z; (g) a nucleotide sequence encoding a biologically active fragment of a HGPRBMY30_{—}1, HGPRBMY30_{—}2, HGPRBMY30_{—}3, HGPRBMY41_{—}1, HGPRBMY41_{—}2, HGPRBMY41_{—}3, HGPRBMY42, HGPRBMY42_{—}1, HGPRBMY43, and/or HGPRBMY44 related polypeptide having an amino acid sequence encoded by a human cDNA plasmid contained in SEQ ID NO:X or the cDNA contained in ATCC deposit No:Z; (h) a nucleotide sequence encoding an antigenic fragment of a HGPRBMY30_{—}1, HGPRBMY30_{—}2, HGPRBMY30_{—}3, HGPRBMY41_{—}1, HGPRBMY41_{—}2, HGPRBMY41_{—}3, HGPRBMY42, HGPRBMY42_{—}1, HGPRBMY43, and/or HGPRBMY44 related polypeptide having an amino acid sequence encoded by a human cDNA plasmid contained in SEQ ID NO:X or the cDNA contained in ATCC deposit No:Z; (I) a nucleotide sequence complimentary to any of the nucleotide sequences in (a), (b), (c), (d), (e), (f), (g), or (h), above.

[0706] The present invention is also directed to polynucleotide sequences which comprise, or alternatively consist of, a polynucleotide sequence which is at least about 80%, 85%, 90%, 91%, 92%, 93%, 94%, 95%, 96%, 97%, 98%, 99%, 99.1%, 99.2%, 99.3%, 99.4%, 99.5%, 99.6%, 99.7%, 99.8%, or 99.9% identical to, for example, any of the nucleotide sequences in (a), (b), (c), (d), (e), (f), (g), or (h), above. Polynucleotides encoded by these nucleic acid molecules are also encompassed by the invention. In another embodiment, the invention encompasses nucleic acid molecules which comprise, or alternatively, consist of a polynucleotide which hybridizes under stringent conditions, or alternatively, under lower stringency conditions, to a polynucleotide in (a), (b), (c), (d), (e), (f), (g), or (h), above. Polynucleotides which hybridize to the complement of these nucleic acid molecules under stringent hybridization conditions or alternatively, under lower stringency conditions, are also encompassed by the invention, as are polypeptides encoded by these polypeptides.

[0707] Another aspect of the invention provides an isolated nucleic acid molecule comprising, or alternatively, consisting of, a polynucleotide having a nucleotide sequence selected from the group consisting of: (a) a nucleotide sequence encoding a HGPRBMY30_{—}1, HGPRBMY30_{—}2, HGPRBMY30_{—}3, HGPRBMY41_{—}1, HGPRBMY41_{—}2, HGPRBMY41_{—}3, HGPRBMY42, HGPRBMY42_{—}1, HGPRBMY43, and/or HGPRBMY44 related polypeptide having an amino acid sequence as shown in the sequence listing and descried in Table I; (b) a nucleotide sequence encoding a mature HGPRBMY30_{—}1, HGPRBMY30_{—}2, HGPRBMY30_{—}3, HGPRBMY41_{—}1, HGPRBMY41_{—}2, HGPRBMY41_{—}3, HGPRBMY42, HGPRBMY42_{—}1, HGPRBMY43, and/or HGPRBMY44 related polypeptide having the amino acid sequence as shown in the sequence listing and descried in Table I; (c) a nucleotide sequence encoding a biologically active fragment of a HGPRBMY30_{—}1, HGPRBMY30_{—}2, HGPRBMY30_{—}3, HGPRBMY41_{—}1, HGPRBMY41_{—}2, HGPRBMY41_{—}3, HGPRBMY42, HGPRBMY42_{—}1, HGPRBMY43, and/or HGPRBMY44 related polypeptide having an amino acid sequence as shown in the sequence listing and descried in Table I; (d) a nucleotide sequence encoding an antigenic fragment of a HGPRBMY30_{—}1, HGPRBMY30_{—}2, HGPRBMY30_{—}3, HGPRBMY41_{—}1, HGPRBMY41_{—}2, HGPRBMY41_{—}3, HGPRBMY42, HGPRBMY42_{—}1, HGPRBMY43, and/or HGPRBMY44 related polypeptide having an amino acid sequence as shown in the sequence listing and descried in Table I; (e) a nucleotide sequence encoding a HGPRBMY30_{—}1, HGPRBMY30_{—}2, HGPRBMY30_{—}3, HGPRBMY41_{—}1, HGPRBMY41_{—}2, HGPRBMY41_{—}3, HGPRBMY42, HGPRBMY42_{—}1, HGPRBMY43, and/or HGPRBMY44 related polypeptide comprising the complete amino acid sequence encoded by a human cDNA in a cDNA plasmid contained in the ATCC Deposit and described in Table I; (f) a nucleotide sequence encoding a mature HGPRBMY30_{—}1, HGPRBMY30_{—}2, HGPRBMY30_{—}3, HGPRBMY41_{—}1, HGPRBMY41_{—}2, HGPRBMY41_{—}3, HGPRBMY42, HGPRBMY42_{—}1, HGPRBMY43, and/or HGPRBMY44 related polypeptide having an amino acid sequence encoded by a human cDNA in a cDNA plasmid contained in the ATCC Deposit and described in Table I: (g) a nucleotide sequence encoding a biologically active fragment of a HGPRBMY30_{—}1, HGPRBMY30_{—}2, HGPRBMY30_{—}3, HGPRBMY41_{—}1, HGPRBMY41_{—}2, HGPRBMY41_{—}3, HGPRBMY42, HGPRBMY42_{—}1, HGPRBMY43, and/or HGPRBMY44 related polypeptide having an amino acid sequence encoded by a human cDNA in a cDNA plasmid contained in the ATCC Deposit and described in Table I; (h) a nucleotide sequence encoding an antigenic fragment of a HGPRBMY30_{—}1, HGPRBMY30_{—}2, HGPRBMY30_{—}3, HGPRBMY41_{—}1, HGPRBMY41_{—}2, HGPRBMY41_{—}3, HGPRBMY42, HGPRBMY42_{—}1, HGPRBMY43, and/or HGPRBMY44 related polypeptide having an amino acid sequence encoded by a human cDNA in a cDNA plasmid contained in the ATCC deposit and described in Table I; (i) a nucleotide sequence complimentary to any of the nucleotide sequences in (a), (b), (c), (d), (e), (f), (g), or (h) above.

[0708] The present invention is also directed to nucleic acid molecules which comprise, or alternatively, consist of, a nucleotide sequence which is at least about 80%, 85%, 90%, 91%, 92%, 93%, 94%, 95%, 96%, 97%, 98%, 99%, 99.1%, 99.2%, 99.3%, 99.4%, 99.5%, 99.6%, 99.7%, 99.8%, or 99.9% identical to, for example, any of the nucleotide sequences in (a), (b), (c), (d), (e), (f), (g), or (h), above.

[0709] The present invention encompasses polypeptide sequences which comprise, or alternatively consist of, an amino acid sequence which is at least about 80%, 85%, 90%, 91%, 92%, 93%, 94%, 95%, 96%, 97%, 98%, 99%, 99.1%, 99.2%, 99.3%, 99.4%, 99.5%, 99.6%, 99.7%, 99.8%, or 99.9% identical to, the following non-limited examples, the polypeptide sequence identified as SEQ ID NO:Y, the polypeptide sequence encoded by a cDNA provided in the deposited clone, and/or polypeptide fragments of any of the polypeptides provided herein. Polynucleotides encoded by these nucleic acid molecules are also encompassed by the invention. In another embodiment, the invention encompasses nucleic acid molecules which comprise, or alternatively, consist of a polynucleotide which hybridizes under stringent conditions, or alternatively, under lower stringency conditions, to a polynucleotide in (a), (b), (c), (d), (e), (f), (g), or (h), above. Polynucleotides which hybridize to the complement of these nucleic acid molecules under stringent hybridization conditions or alternatively, under lower stringency conditions, are also encompassed by the invention, as are polypeptides encoded by these polypeptides.

[0710] The present invention is also directed to polypeptides which comprise, or alternatively consist of, an amino acid sequence which is at least about 80%, 85%, 90%, 91%, 92%, 93%, 94%, 95%, 96%, 97%, 98%, 99%, 99.1%, 99.2%, 99.3%, 99.4%, 99.5%, 99.6%, 99.7%, 99.8%, or 99.9% identical to, for example, the polypeptide sequence shown in SEQ ID NO:Y, a polypeptide sequence encoded by the nucleotide sequence in SEQ ID NO:X, a polypeptide sequence encoded by the cDNA in cDNA plasmid:Z, and/or polypeptide fragments of any of these polypeptides (e.g., those fragments described herein). Polynucleotides which hybridize to the complement of the nucleic acid molecules encoding these polypeptides under stringent hybridization conditions or alternatively, under lower stringency conditions, are also encompasses by the present invention, as are the polypeptides encoded by these polynucleotides.

[0711] By a nucleic acid having a nucleotide sequence at least, for example, 95% “identical” to a reference nucleotide sequence of the present invention, it is intended that the nucleotide sequence of the nucleic acid is identical to the reference sequence except that the nucleotide sequence may include up to five point mutations per each 100 nucleotides of the reference nucleotide sequence encoding the polypeptide. In other words, to obtain a nucleic acid having a nucleotide sequence at least 95% identical to a reference nucleotide sequence, up to 5% of the nucleotides in the reference sequence may be deleted or substituted with another nucleotide, or a number of nucleotides up to 5% of the total nucleotides in the reference sequence may be inserted into the reference sequence. The query sequence may be an entire sequence referenced in Table I, the ORF (open reading frame), or any fragment specified as described herein.

[0712] As a practical matter, whether any particular nucleic acid molecule or polypeptide is at least about 80%, 85%, 90%, 91%, 92%, 93%, 94%, 95%, 96%, 97%, 98%, 99%, 99.1%, 99.2%, 99.3%, 99.4%, 99.5%, 99.6%, 99.7%, 99.8%, or 99.9% identical to a nucleotide sequence of the present invention can be determined conventionally using known computer programs. A preferred method for determining the best overall match between a query sequence (a sequence of the present invention) and a subject sequence, also referred to as a global sequence alignment, can be determined using the CLUSTALW computer program (Thompson, J. D., et al., Nucleic Acids Research, 2(22):4673-4680, (1994)), which is based on the algorithm of Higgins, D. G., et al., Computer Applications in the Biosciences (CABIOS), 8(2):189-191, (1992). In a sequence alignment the query and subject sequences are both DNA sequences. An RNA sequence can be compared by converting U's to T's. However, the CLUSTALW algorithm automatically converts U's to T's when comparing RNA sequences to DNA sequences. The result of said global sequence alignment is in percent identity. Preferred parameters used in a CLUSTALW alignment of DNA sequences to calculate percent identity via pairwise alignments are: Matrix=IUB, k-tuple=1, Number of Top Diagonals=5, Gap Penalty=3, Gap Open Penalty 10, Gap Extension Penalty=0.1, Scoring Method=Percent, Window Size=5 or the length of the subject nucleotide sequence, whichever is shorter. For multiple alignments, the following CLUSTALW parameters are preferred: Gap Opening Penalty=10; Gap Extension Parameter=0.05; Gap Separation Penalty Range=8; End Gap Separation Penalty=Off; % Identity for Alignment Delay=40%; Residue Specific Gaps:Off; Hydrophilic Residue Gap=Off; and Transition Weighting=0. The pairwise and multple alignment parameters provided for CLUSTALW above represent the default parameters as provided with the AlignX software program (Vector NTI suite of programs, version 6.0).

[0713] The present invention encompasses the application of a manual correction to the percent identity results, in the instance where the subject sequence is shorter than the query sequence because of 5′ or 3′ deletions, not because of internal deletions. If only the local pairwise percent identity is required, no manual correction is needed. However, a manual correction may be applied to determine the global percent identity from a global polynucleotide alignment. Percent identity calculations based upon global polynucleotide alignments are often preferred since they reflect the percent identity between the polynucleotide molecules as a whole (i.e., including any polynucleotide overhangs, not just overlapping regions), as opposed to, only local matching polynucleotides. Manual corrections for global percent identity determinations are required since the CLUSTALW program does not account for 5′ and 3′ truncations of the subject sequence when calculating percent identity. For subject sequences truncated at the 5′ or 3′ ends, relative to the query sequence, the percent identity is corrected by calculating the number of bases of the query sequence that are 5′ and 3′ of the subject sequence, which are not matched/aligned, as a percent of the total bases of the query sequence. Whether a nucleotide is matched/aligned is determined by results of the CLUSTALW sequence alignment. This percentage is then subtracted from the percent identity, calculated by the above CLUSTALW program using the specified parameters, to arrive at a final percent identity score. This corrected score may be used for the purposes of the present invention. Only bases outside the 5′ and 3′ bases of the subject sequence, as displayed by the CLUSTALW alignment, which are not matched/aligned with the query sequence, are calculated for the purposes of manually adjusting the percent identity score.

[0714] For example, a 90 base subject sequence is aligned to a 100 base query sequence to determine percent identity. The deletions occur at the 5′ end of the subject sequence and therefore, the CLUSTALW alignment does not show a matched/alignment of the first 10 bases at 5′ end. The 10 unpaired bases represent 10% of the sequence (number of bases at the 5′ and 3′ ends not matched/total number of bases in the query sequence) so 10% is subtracted from the percent identity score calculated by the CLUSTALW program. If the remaining 90 bases were perfectly matched the final percent identity would be 90%. In another example, a 90 base subject sequence is compared with a 100 base query sequence. This time the deletions are internal deletions so that there are no bases on the 5′ or 3′ of the subject sequence which are not matched/aligned with the query. In this case the percent identity calculated by CLUSTALW is not manually corrected. Once again, only bases 5′ and 3′ of the subject sequence which are not matched/aligned with the query sequence are manually corrected for. No other manual corrections are required for the purposes of the present invention.

[0715] In addition to the above method of aligning two or more polynucleotide or polypeptide sequences to arrive at a percent identity value for the aligned sequences, it may be desirable in some circumstances to use a modified version of the CLUSTALW algorithm which takes into account known structural features of the sequences to be aligned, such as for example, the SWISS-PROT designations for each sequence. The result of such a modifed CLUSTALW algorithm may provide a more accurate value of the percent identity for two polynucleotide or polypeptide sequences. Support for such a modified version of CLUSTALW is provided within the CLUSTALW algorithm and would be readily appreciated to one of skill in the art of bioinformatics.

[0716] The variants may contain alterations in the coding regions, non-coding regions, or both. Especially preferred are polynucleotide variants containing alterations which produce silent substitutions, additions, or deletions, but do not alter the properties or activities of the encoded polypeptide. Nucleotide variants produced by silent substitutions due to the degeneracy of the genetic code are preferred. Moreover, variants in which 5-10, 1-5, or 1-2 amino acids are substituted, deleted, or added in any combination are also preferred. Polynucleotide variants can be produced for a variety of reasons, e.g., to optimize codon expression for a particular host (change codons in the mRNA to those preferred by a bacterial host such as E. coli).

[0717] Naturally occurring variants are called “allelic variants” and refer to one of several alternate forms of a gene occupying a given locus on a chromosome of an organism. (Genes II, Lewin, B., ed., John Wiley & Sons, New York (1985).) These allelic variants can vary at either the polynucleotide and/or polypeptide level and are included in the present invention. Alternatively, non-naturally occurring variants may be produced by mutagenesis techniques or by direct synthesis.

[0718] Using known methods of protein engineering and recombinant DNA technology, variants may be generated to improve or alter the characteristics of the polypeptides of the present invention. For instance, one or more amino acids can be deleted from the N-terminus or C-terminus of the protein without substantial loss of biological function. The authors of Ron et al., J. Biol. Chem. 268: 2984-2988 (1993), reported variant KGF proteins having heparin binding activity even after deleting 3, 8, or 27 amino-terminal amino acid residues. Similarly, Interferon gamma exhibited up to ten times higher activity after deleting 8-10 amino acid residues from the carboxy terminus of this protein (Dobeli et al., J. Biotechnology 7:199-216 (1988)).

[0719] Moreover, ample evidence demonstrates that variants often retain a biological activity similar to that of the naturally occurring protein. For example, Gayle and coworkers (J. Biol. Chem. 268:22105-22111 (1993)) conducted extensive mutational analysis of human cytokine IL-1a. They used random mutagenesis to generate over 3,500 individual IL-1a mutants that averaged 2.5 amino acid changes per variant over the entire length of the molecule. Multiple mutations were examined at every possible amino acid position. The investigators found that “[m]ost of the molecule could be altered with little effect on either [binding or biological activity].” In fact, only 23 unique amino acid sequences, out of more than 3,500 nucleotide sequences examined, produced a protein that significantly differed in activity from wild-type.

[0720] Furthermore, even if deleting one or more amino acids from the N-terminus or C-terminus of a polypeptide results in modification or loss of one or more biological functions, other biological activities may still be retained. For example, the ability of a deletion variant to induce and/or to bind antibodies which recognize the protein will likely be retained when less than the majority of the residues of the protein are removed from the N-terminus or C-terminus. Whether a particular polypeptide lacking N- or C-terminal residues of a protein retains such immunogenic activities can readily be determined by routine methods described herein and otherwise known in the art.

[0721] Alternatively, such N-terminus or C-terminus deletions of a polypeptide of the present invention may, in fact, result in a significant increase in one or more of the biological activities of the polypeptide(s). For example, biological activity of many polypeptides are governed by the presence of regulatory domains at either one or both termini. Such regulatory domains effectively inhibit the biological activity of such polypeptides in lieu of an activation event (e.g., binding to a cognate ligand or receptor, phosphorylation, proteolytic processing, etc.). Thus, by eliminating the regulatory domain of a polypeptide, the polypeptide may effectively be rendered biologically active in the absence of an activation event.

[0722] Thus, the invention further includes polypeptide variants that show substantial biological activity. Such variants include deletions, insertions, inversions, repeats, and substitutions selected according to general rules known in the art so as have little effect on activity. For example, guidance concerning how to make phenotypically silent amino acid substitutions is provided in Bowie et al., Science 247:1306-1310 (1990), wherein the authors indicate that there are two main strategies for studying the tolerance of an amino acid sequence to change.

[0723] The first strategy exploits the tolerance of amino acid substitutions by natural selection during the process of evolution. By comparing amino acid sequences in different species, conserved amino acids can be identified. These conserved amino acids are likely important for protein function. In contrast, the amino acid positions where substitutions have been tolerated by natural selection indicates that these positions are not critical for protein function. Thus, positions tolerating amino acid substitution could be modified while still maintaining biological activity of the protein.

[0724] The second strategy uses genetic engineering to introduce amino acid changes at specific positions of a cloned gene to identify regions critical for protein function. For example, site directed mutagenesis or alanine-scanning mutagenesis (introduction of single alanine mutations at every residue in the molecule) can be used. (Cunningham and Wells, Science 244:1081-1085 (1989).) The resulting mutant molecules can then be tested for biological activity.

[0725] As the authors state, these two strategies have revealed that proteins are surprisingly tolerant of amino acid substitutions. The authors further indicate which amino acid changes are likely to be permissive at certain amino acid positions in the protein. For example, most buried (within the tertiary structure of the protein) amino acid residues require nonpolar side chains, whereas few features of surface side chains are generally conserved.

[0726] The invention encompasses polypeptides having a lower degree of identity but having sufficient similarity so as to perform one or more of the same functions performed by the polypeptide of the present invention. Similarity is determined by conserved amino acid substitution. Such substitutions are those that substitute a given amino acid in a polypeptide by another amino acid of like characteristics (e.g., chemical properties). According to Cunningham et al above, such conservative substitutions are likely to be phenotypically silent. Additional guidance concerning which amino acid changes are likely to be phenotypically silent are found in Bowie et al., Science 247:1306-1310 (1990).

[0727] The invention encompasses polypeptides having a lower degree of identity but having sufficient similarity so as to perform one or more of the same functions performed by the polypeptide of the present invention. Similarity is determined by conserved amino acid substitution. Such substitutions are those that substitute a given amino acid in a polypeptide by another amino acid of like characteristics (e.g., chemical properties). According to Cunningham et al above, such conservative substitutions are likely to be phenotypically silent. Additional guidance concerning which amino acid changes are likely to be phenotypically silent are found in Bowie et al., Science 247:1306-1310 (1990).

[0728] Tolerated conservative amino acid substitutions of the present invention involve replacement of the aliphatic or hydrophobic amino acids Ala, Val, Leu and le; replacement of the hydroxyl residues Ser and Thr; replacement of the acidic residues Asp and Glu; replacement of the amide residues Asn and Gin, replacement of the basic residues Lys, Arg, and His; replacement of the aromatic residues Phe, Tyr, and Trp, and replacement of the small-sized amino acids Ala, Ser, Thr, Met, and Gly.

[0729] In addition, the present invention also encompasses the conservative substitutions provided in Table III below.

TABLE III

| For Amino | | |
|---|---|---|
| Acid | Code | Replace with any of: |
| Alanine | A | D-Ala, Gly, beta-Ala, L-Cys, D-Cys |
| Arginine | R | D-Arg, Lys, D-Lys, homo-Arg, D-homo-Arg, |
| | | Met, Ile, D-Met, D-Ile, Orn, D-Orn |
| Asparagine | N | D-Asn, Asp, D-Asp, Glu, D-Glu, Gln, D-Gln |
| Aspartic | D | D-Asp, D-Asn, Asn, Glu, D-Glu, Gln, D-Gln |
| Acid | | |
| Cysteine | C | D-Cys, S—Me-Cys, Met, D-Met, Thr, D-Thr |
| Glutamine | Q | D-Gln, Asn, D-Asn, Glu, D-Glu, Asp, D-Asp |
| Glutamic | E | D-Glu, D-Asp, Asp, Asn, D-Asn, Gln, D-Gln |
| Acid | | |
| Glycine | G | Ala, D-Ala, Pro, D-Pro, β-Ala, Acp |
| Isoleucine | I | D-Ile, Val, D-Val, Leu, D-Leu, Met, D-Met |
| Leucine | L | D-Leu, Val, D-Val, Met, D-Met |
| Lysine | K | D-Lys, Arg, D-Arg, homo-Arg, D-homo-Arg, |
| | | Met, D-Met, Ile, D-Ile, Orn, D-Orn |
| Methionine | M | D-Met, S—Me-Cys, Ile, D-Ile, Leu, D-Leu, Val, |
| | | D-Val |
| Phenylalanine | F | D-Phe, Tyr, D-Thr, L-Dopa, His, D-His, Trp, |
| | | D-Trp, Trans-3,4, or 5-phenylproline, cis-3,4, or |
| | | 5-phenylproline |
| Proline | P | D-Pro, L-1-thioazolidine-4-carboxylic acid, D- or |
| | | L-1-oxazolidine-4-carboxylic acid |
| Serine | S | D-Ser, Thr, D-Thr, allo-Thr, Met, D-Met, |
| | | Met(O), D-Met(O), L-Cys, D-Cys |
| Threonine | T | D-Thr, Ser, D-Ser, allo-Thr, Met, D-Met, Met(O), |
| | | D-Met(O), Val, D-Val |
| Tyrosine | Y | D-Tyr, Phe, D-Phe, L-Dopa, His, D-His |
| Valine | V | D-Val, Leu, D-Leu, Ile, D-Ile, Met, D-Met |

[0730] Aside from the uses described above, such amino acid substitutions may also increase protein or peptide stability. The invention encompasses amino acid substitutions that contain, for example, one or more non-peptide bonds (which replace the peptide bonds) in the protein or peptide sequence. Also included are substitutions that include amino acid residues other than naturally occurring L-amino acids, e.g., D-amino acids or non-naturally occurring or synthetic amino acids, e.g., β or γ amino acids.

[0731] Both identity and similarity can be readily calculated by reference to the following publications: Computational Molecular Biology, Lesk, A. M., ed., Oxford University Press, New York, 1988; Biocomputing: Informatics and Genome Projects, Smith, D. W., ed., Academic Press, New York, 1993; Informatics Computer Analysis of Sequence Data, Part 1, Griffin, A. M., and Griffin, H. G., eds., Humana Press, New Jersey, 1994; Sequence Analysis in Molecular Biology, von Heinje, G., Academic Press, 1987; and Sequence Analysis Primer, Gribskov, M. and Devereux, J., eds., M Stockton Press, New York, 1991.

[0732] In addition, the present invention also encompasses substitution of amino acids based upon the probability of an amino acid substitution resulting in conservation of function. Such probabilities are determined by aligning multiple genes with related function and assessing the relative penalty of each substitution to proper gene function. Such probabilities are often described in a matrix and are used by some algorithms (e.g., BLAST, CLUSTALW, GAP, etc.) in calculating percent similarity wherein similarity refers to the degree by which one amino acid may substitute for another amino acid without lose of function. An example of such a matrix is the PAM250 or BLOSUM62 matrix.

[0733] Aside from the canonical chemically conservative substitutions referenced above, the invention also encompasses substitutions which are typically not classified as conservative, but that may be chemically conservative under certain circumstances. Analysis of enzymatic catalysis for proteases, for example, has shown that certain amino acids within the active site of some enzymes may have highly perturbed pKa's due to the unique microenvironment of the active site. Such perturbed pKa's could enable some amino acids to substitute for other amino acids while conserving enzymatic structure and function. Examples of amino acids that are known to have amino acids with perturbed pKa's are the Glu-35 residue of Lysozyme, the Ile-16 residue of Chymotrypsin, the His-159 residue of Papain, etc. The conservation of function relates to either anomalous protonation or anomalous deprotonation of such amino acids, relative to their canonical, non-perturbed pKa. The pKa perturbation may enable these amino acids to actively participate in general acid-base catalysis due to the unique ionization environment within the enzyme active site. Thus, substituting an amino acid capable of serving as either a general acid or general base within the microenvironment of an enzyme active site or cavity, as may be the case, in the same or similar capacity as the wild-type amino acid, would effectively serve as a conservative amino substitution.

[0734] Besides conservative amino acid substitution, variants of the present invention include, but are not limited to, the following: (i) substitutions with one or more of the non-conserved amino acid residues, where the substituted amino acid residues may or may not be one encoded by the genetic code, or (ii) substitution with one or more of amino acid residues having a substituent group, or (iii) fusion of the mature polypeptide with another compound, such as a compound to increase the stability and/or solubility of the polypeptide (for example, polyethylene glycol), or (iv) fusion of the polypeptide with additional amino acids, such as, for example, an IgG Fc fusion region peptide, or leader or secretory sequence, or a sequence facilitating purification. Such variant polypeptides are deemed to be within the scope of those skilled in the art from the teachings herein.

[0735] For example, polypeptide variants containing amino acid substitutions of charged amino acids with other charged or neutral amino acids may produce proteins with improved characteristics, such as less aggregation. Aggregation of pharmaceutical formulations both reduces activity and increases clearance due to the aggregate's immunogenic activity. (Pinckard et al., Clin. Exp. Immunol. 2:331-340 (1967); Robbins et al., Diabetes 36: 838-845 (1987); Cleland et al., Crit. Rev. Therapeutic Drug Carrier Systems 10:307-377 (1993).)

[0736] Moreover, the invention further includes polypeptide variants created through the application of molecular evolution (“DNA Shuffling”) methodology to the polynucleotide disclosed as SEQ ID NO:X, the sequence of the clone submitted in a deposit, and/or the cDNA encoding the polypeptide disclosed as SEQ ID NO:Y. Such DNA Shuffling technology is known in the art and more particularly described elsewhere herein (e.g., WPC, Stemmer, PNAS, 91:10747, (1994)), and in the Examples provided herein).

[0737] A further embodiment of the invention relates to a polypeptide which comprises the amino acid sequence of the present invention having an amino acid sequence which contains at least one amino acid substitution, but not more than 50 amino acid substitutions, even more preferably, not more than 40 amino acid substitutions, still more preferably, not more than 30 amino acid substitutions, and still even more preferably, not more than 20 amino acid substitutions. Of course, in order of ever-increasing preference, it is highly preferable for a peptide or polypeptide to have an amino acid sequence which comprises the amino acid sequence of the present invention, which contains at least one, but not more than 10, 9, 8, 7, 6, 5, 4, 3, 2 or 1 amino acid substitutions. In specific embodiments, the number of additions, substitutions, and/or deletions in the amino acid sequence of the present invention or fragments thereof (e.g., the mature form and/or other fragments described herein), is 1-5, 5-10, 5-25, 5-50, 10-50 or 50-150, conservative amino acid substitutions are preferable.

[0738] Polynucleotide and Polypeptide Fragments

[0739] The present invention is directed to polynucleotide fragments of the polynucleotides of the invention, in addition to polypeptides encoded therein by said polynucleotides and/or fragments.

[0740] In the present invention, a “polynucleotide fragment” refers to a short polynucleotide having a nucleic acid sequence which: is a portion of that contained in a deposited clone, or encoding the polypeptide encoded by the cDNA in a deposited clone; is a portion of that shown in SEQ ID NO:X or the complementary strand thereto, or is a portion of a polynucleotide sequence encoding the polypeptide of SEQ ID NO:Y. The nucleotide fragments of the invention are preferably at least about 15 nt, and more preferably at least about 20 nt, still more preferably at least about 30 nt, and even more preferably, at least about 40 nt, at least about 50 nt, at least about 75 nt, or at least about 150 nt in length. A fragment “at least 20 nt in length” for example, is intended to include 20 or more contiguous bases from the cDNA sequence contained in a deposited clone or the nucleotide sequence shown in SEQ ID NO:X. In this context “about” includes the particularly recited value, a value larger or smaller by several (5, 4, 3, 2, or 1) nucleotides, at either terminus, or at both termini. These nucleotide fragments have uses that include, but are not limited to, as diagnostic probes and primers as discussed herein. Of course, larger fragments (e.g., 50, 150, 500, 600, 2000 nucleotides) are preferred.

[0741] Moreover, representative examples of polynucleotide fragments of the invention, include, for example, fragments comprising, or alternatively consisting of, a sequence from about nucleotide number 1-50, 51-100, 101-150, 151-200, 201-250, 251-300, 301-350, 351-400, 401-450, 451-500, 501-550, 551-600, 651-700, 701-750, 751-800, 800-850, 851-900, 901-950, 951-1000, 1001-1050, 1051-1100, 1101-1150, 1151-1200, 1201-1250, 1251-1300, 1301-1350, 1351-1400, 1401-1450, 1451-1500, 1501-1550, 1551-1600, 1601-1650, 1651-1700, 1701-1750, 1751-1800, 1801-1850, 1851-1900, 1901-1950, 1951-2000, or 2001 to the end of SEQ ID NO:X, or the complementary strand thereto, or the cDNA contained in a deposited clone. In this context “about” includes the particularly recited ranges, and ranges larger or smaller by several (5, 4, 3, 2, or 1) nucleotides, at either terminus or at both termini. Preferably, these fragments encode a polypeptide which has biological activity. More preferably, these polynucleotides can be used as probes or primers as discussed herein. Also encompassed by the present invention are polynucleotides which hybridize to these nucleic acid molecules under stringent hybridization conditions or lower stringency conditions, as are the polypeptides encoded by these polynucleotides.

[0742] In the present invention, a “polypeptide fragment” refers to an amino acid sequence which is a portion of that contained in SEQ ID NO:Y or encoded by the cDNA contained in a deposited clone. Protein (polypeptide) fragments may be “free-standing” or comprised within a larger polypeptide of which the fragment forms a part or region, most preferably as a single continuous region. Representative examples of polypeptide fragments of the invention, include, for example, fragments comprising, or alternatively consisting of, from about amino acid number 1-20, 21-40, 41-60, 61-80, 81-100, 102-120, 121-140, 141-160, or 161 to the end of the coding region. Moreover, polypeptide fragments can be about 20, 30, 40, 50, 60, 70, 80, 90, 100, 110, 120, 130, 140, or 150 amino acids in length. In this context “about” includes the particularly recited ranges or values, and ranges or values larger or smaller by several (5, 4, 3, 2, or 1) amino acids, at either extreme or at both extremes. Polynucleotides encoding these polypeptides are also encompassed by the invention.

[0743] Preferred polypeptide fragments include the full-length protein. Further preferred polypeptide fragments include the full-length protein having a continuous series of deleted residues from the amino or the carboxy terminus, or both. For example, any number of amino acids, ranging from 1-60, can be deleted from the amino terminus of the full-length polypeptide. Similarly, any number of amino acids, ranging from 1-30, can be deleted from the carboxy terminus of the full-length protein. Furthermore, any combination of the above amino and carboxy terminus deletions are preferred. Similarly, polynucleotides encoding these polypeptide fragments are also preferred.

[0744] Also preferred are polypeptide and polynucleotide fragments characterized by structural or functional domains, such as fragments that comprise alpha-helix and alpha-helix forming regions, beta-sheet and beta-sheet-forming regions, turn and turn-forming regions, coil and coil-forming regions, hydrophilic regions, hydrophobic regions, alpha amphipathic regions, beta amphipathic regions, flexible regions, surface-forming regions, substrate binding region, and high antigenic index regions. Polypeptide fragments of SEQ ID NO:Y falling within conserved domains are specifically contemplated by the present invention. Moreover, polynucleotides encoding these domains are also contemplated.

[0745] Other preferred polypeptide fragments are biologically active fragments. Biologically active fragments are those exhibiting activity similar, but not necessarily identical, to an activity of the polypeptide of the present invention. The biological activity of the fragments may include an improved desired activity, or a decreased undesirable activity. Polynucleotides encoding these polypeptide fragments are also encompassed by the invention.

[0746] In a preferred embodiment, the functional activity displayed by a polypeptide encoded by a polynucleotide fragment of the invention may be one or more biological activities typically associated with the full-length polypeptide of the invention. Illustrative of these biological activities includes the fragments ability to bind to at least one of the same antibodies which bind to the full-length protein, the fragments ability to interact with at lease one of the same proteins which bind to the full-length, the fragments ability to elicit at least one of the same immune responses as the full-length protein (i.e., to cause the immune system to create antibodies specific to the same epitope, etc.), the fragments ability to bind to at least one of the same polynucleotides as the full-length protein, the fragments ability to bind to a receptor of the full-length protein, the fragments ability to bind to a ligand of the full-length protein, and the fragments ability to multimerize with the full-length protein. However, the skilled artisan would appreciate that some fragments may have biological activities which are desirable and directly inapposite to the biological activity of the full-length protein. The functional activity of polypeptides of the invention, including fragments, variants, derivatives, and analogs thereof can be determined by numerous methods available to the skilled artisan, some of which are described elsewhere herein.

[0747] The present invention encompasses polypeptides comprising, or alternatively consisting of, an epitope of the polypeptide having an amino acid sequence of SEQ ID NO:Y, or an epitope of the polypeptide sequence encoded by a polynucleotide sequence contained in ATCC Deposit No:Z or encoded by a polynucleotide that hybridizes to the complement of the sequence of SEQ ID NO:X or contained in ATCC Deposit No:Z under stringent hybridization conditions or lower stringency hybridization conditions as defined supra. The present invention further encompasses polynucleotide sequences encoding an epitope of a polypeptide sequence of the invention (such as, for example, the sequence disclosed in SEQ ID NO:1, SEQ ID NO:3, SEQ ID NO:5, SEQ ID NO:7, SEQ ID NO:9, SEQ ID NO:11, SEQ ID NO:13, SEQ ID NO:15, SEQ ID NO:17, and/or SEQ ID NO:19), polynucleotide sequences of the complementary strand of a polynucleotide sequence encoding an epitope of the invention, and polynucleotide sequences which hybridize to the complementary strand under stringent hybridization conditions or lower stringency hybridization conditions defined supra.

[0748] The term “epitopes” as used herein, refers to portions of a polypeptide having antigenic or immunogenic activity in an animal, preferably a mammal, and most preferably in a human. In a preferred embodiment, the present invention encompasses a polypeptide comprising an epitope, as well as the polynucleotide encoding this polypeptide. An “immunogenic epitope” as used herein, is defined as a portion of a protein that elicits an antibody response in an animal, as determined by any method known in the art, for example, by the methods for generating antibodies described infra. (See, for example, Geysen et al., Proc. Natl. Acad. Sci. USA 81:3998-4002 (1983)). The term “antigenic epitope” as used herein, is defined as a portion of a protein to which an antibody can immunospecifically bind its antigen as determined by any method well known in the art, for example, by the immunoassays described herein. Immunospecific binding excludes non-specific binding but does not necessarily exclude cross-reactivity with other antigens. Antigenic epitopes need not necessarily be immunogenic.

[0749] Fragments which function as epitopes may be produced by any conventional means. (See, e.g., Houghten, Proc. Natl. Acad. Sci. USA 82:5131-5135 (1985), further described in U.S. Pat. No. 4,631,21 1).

[0750] In the present invention, antigenic epitopes preferably contain a sequence of at least 4, at least 5, at least 6, at least 7, more preferably at least 8, at least 9, at least 10, at least 11, at least 12, at least 13, at least 14, at least 15, at least 20, at least 25, at least 30, at least 40, at least 50, and, most preferably, between about 15 to about 30 amino acids. Preferred polypeptides comprising immunogenic or antigenic epitopes are at least 10, 15, 20, 25, 30, 35, 40, 45, 50, 55, 60, 65, 70, 75, 80, 85, 90, 95, or 100 amino acid residues in length, or longer. Additional non-exclusive preferred antigenic epitopes include the antigenic epitopes disclosed herein, as well as portions thereof. Antigenic epitopes are useful, for example, to raise antibodies, including monoclonal antibodies, that specifically bind the epitope. Preferred antigenic epitopes include the antigenic epitopes disclosed herein, as well as any combination of two, three, four, five or more of these antigenic epitopes. Antigenic epitopes can be used as the target molecules in immunoassays. (See, for instance, Wilson et al., Cell 37:767-778 (1984); Sutcliffe et al., Science 219:660-666 (1983)).

[0751] Similarly, immunogenic epitopes can be used, for example, to induce antibodies according to methods well known in the art. (See, for instance, Sutcliffe et al., supra; Wilson et al., supra; Chow et al., Proc. Natl. Acad. Sci. USA 82:910-914; and Bittle et al., J. Gen. Virol. 66:2347-2354 (1985). Preferred immunogenic epitopes include the immunogenic epitopes disclosed herein, as well as any combination of two, three, four, five or more of these immunogenic epitopes. The polypeptides comprising one or more immunogenic epitopes may be presented for eliciting an antibody response together with a carrier protein, such as an albumin, to an animal system (such as rabbit or mouse), or, if the polypeptide is of sufficient length (at least about 25 amino acids), the polypeptide may be presented without a carrier. However, immunogenic epitopes comprising as few as 8 to 10 amino acids have been shown to be sufficient to raise antibodies capable of binding to, at the very least, linear epitopes in a denatured polypeptide (e.g., in Western blotting).

[0752] Epitope-bearing polypeptides of the present invention may be used to induce antibodies according to methods well known in the art including, but not limited to, in vivo immunization, in vitro immunization, and phage display methods. See, e.g., Sutcliffe et al., supra; Wilson et al., supra, and Bittle et al., J. Gen. Virol., 66:2347-2354 (1985). If in vivo immunization is used, animals may be immunized with free peptide; however, anti-peptide antibody titer may be boosted by coupling the peptide to a macromolecular carrier, such as keyhole limpet hemacyanin (KLH) or tetanus toxoid. For instance, peptides containing cysteine residues may be coupled to a carrier using a linker such as maleimidobenzoyl-N-hydroxysuccinimide ester (MBS), while other peptides may be coupled to carriers using a more general linking agent such as glutaraldehyde. Animals such as rabbits, rats and mice are immunized with either free or carrier-coupled peptides, for instance, by intraperitoneal and/or intradermal injection of emulsions containing about 100 μg of peptide or carrier protein and Freund's adjuvant or any other adjuvant known for stimulating an immune response. Several booster injections may be needed, for instance, at intervals of about two weeks, to provide a useful titer of anti-peptide antibody which can be detected, for example, by ELISA assay using free peptide adsorbed to a solid surface. The titer of anti-peptide antibodies in serum from an immunized animal may be increased by selection of anti-peptide antibodies, for instance, by adsorption to the peptide on a solid support and elution of the selected antibodies according to methods well known in the art.

[0753] As one of skill in the art will appreciate, and as discussed above, the polypeptides of the present invention comprising an immunogenic or antigenic epitope can be fused to other polypeptide sequences. For example, the polypeptides of the present invention may be fused with the constant domain of immunoglobulins (IgA, IgE, IgG, IgM), or portions thereof .(CH1, CH2, CH3, or any combination thereof and portions thereof) resulting in chimeric polypeptides. Such fusion proteins may facilitate purification and may increase half-life in vivo. This has been shown for chimeric proteins consisting of the first two domains of the human CD4-polypeptide and various domains of the constant regions of the heavy or light chains of mammalian immunoglobulins. See, e.g., EP 394,827; Traunecker et al., Nature, 331:84-86 (1988). Enhanced delivery of an antigen across the epithelial barrier to the immune system has been demonstrated for antigens (e.g., insulin) conjugated to an FcRn binding partner such as IgG or Fc fragments (see, e.g., PCT Publications WO 96/22024 and WO 99/04813). IgG Fusion proteins that have a disulfide-linked dimeric structure due to the IgG portion disulfide bonds have also been found to be more efficient in binding and neutralizing other molecules than monomeric polypeptides or fragments thereof alone. See, e.g., Fountoulakis et al., J. Biochem., 270:3958-3964 (1995). Nucleic acids encoding the above epitopes can also be recombined with a gene of interest as an epitope tag (e.g., the hemagglutinin (“HA”) tag or flag tag) to aid in detection and purification of the expressed polypeptide. For example, a system described by Janknecht et al. allows for the ready purification of non-denatured fusion proteins expressed in human cell lines (Janknecht et al., 1991, Proc. Natl. Acad. Sci. USA 88:8972-897). In this system, the gene of interest is subcloned into a vaccinia recombination plasmid such that the open reading frame of the gene is translationally fused to an amino-terminal tag consisting of six histidine residues. The tag serves as a matrix binding domain for the fusion protein. Extracts from cells infected with the recombinant vaccinia virus are loaded onto Ni2+ nitriloacetic acid-agarose column and histidine-tagged proteins can be selectively eluted with imidazole-containing buffers.

[0754] Additional fusion proteins of the invention may be generated through the techniques of gene-shuffling, motif-shuffling, exon-shuffling, and/or codon-shuffling (collectively referred to as “DNA shuffling”). DNA shuffling may be employed to modulate the activities of polypeptides of the invention, such methods can be used to generate polypeptides with altered activity, as well as agonists and antagonists of the polypeptides. See, generally, U.S. Pat. Nos. 5,605,793; 5,811,238; 5,830,721; 5,834,252; and 5,837,458, and Patten et al., Curr. Opinion Biotechnol. 8:724-33 (1997); Harayama, Trends Biotechnol. 16(2):76-82 (1998); Hansson, et al., J. Mol. Biol. 287:265-76 (1999); and Lorenzo and Blasco, Biotechniques 24(2):308-13 (1998) (each of these patents and publications are hereby incorporated by reference in its entirety). In one embodiment, alteration of polynucleotides corresponding to SEQ ID NO:X and the polypeptides encoded by these polynucleotides may be achieved by DNA shuffling. DNA shuffling involves the assembly of two or more DNA segments by homologous or site-specific recombination to generate variation in the polynucleotide sequence. In another embodiment, polynucleotides of the invention, or the encoded polypeptides, may be altered by being subjected to random mutagenesis by error-prone PCR, random nucleotide insertion or other methods prior to recombination. In another embodiment, one or more components, motifs, sections, parts, domains, fragments, etc., of a polynucleotide encoding a polypeptide of the invention may be recombined with one or more components, motifs, sections, parts, domains, fragments, etc. of one or more heterologous molecules.

[0755] Antibodies

[0756] Further polypeptides of the invention relate to antibodies and T-cell antigen receptors (TCR) which immunospecifically bind a polypeptide, polypeptide fragment, or variant of SEQ ID NO:2, SEQ ID NO:4, SEQ ID NO:6, SEQ ID NO:8, SEQ ID NO:10, SEQ ID NO:12, SEQ ID NO:14, SEQ ID NO:16, SEQ ID NO:18, and/or SEQ ID NO:20, and/or an epitope, of the present invention (as determined by immunoassays well known in the art for assaying specific antibody-antigen binding). Antibodies of the invention include, but are not limited to, polyclonal, monoclonal, monovalent, bispecific, heteroconjugate, multispecific, human, humanized or chimeric antibodies, single chain antibodies, Fab fragments, F(ab′) fragments, fragments produced by a Fab expression library, anti-idiotypic (anti-Id) antibodies (including, e.g., anti-Id antibodies to antibodies of the invention), and epitope-binding fragments of any of the above. The term “antibody,” as used herein, refers to immunoglobulin molecules and immunologically active portions of immunoglobulin molecules, i.e., molecules that contain an antigen binding site that immunospecifically binds an antigen. The immunoglobulin molecules of the invention can be of any type (e.g., IgG, IgE, IgM, IgD, IgA and IgY), class (e.g., IgG1, IgG2, IgG3, IgG4, IgA1 and IgA2) or subclass of immunoglobulin molecule. Moreover, the term “antibody” (Ab) or “monoclonal antibody” (Mab) is meant to include intact molecules, as well as, antibody fragments (such as, for example, Fab and F(ab′)2 fragments) which are capable of specifically binding to protein. Fab and F(ab′)2 fragments lack the Fc fragment of intact antibody, clear more rapidly from the circulation of the animal or plant, and may have less non-specific tissue binding than an intact antibody (Wahl et al., J. Nucl. Med. 24:316-325 (1983)). Thus, these fragments are preferred, as well as the products of a FAB or other immunoglobulin expression library. Moreover, antibodies of the present invention include chimeric, single chain, and humanized antibodies.

[0757] Most preferably the antibodies are human antigen-binding antibody fragments of the present invention and include, but are not limited to, Fab, Fab′ and F(ab′)2, Fd, single-chain Fvs (scFv), single-chain antibodies, disulfide-linked Fvs (sdFv) and fragments comprising either a VL or VH domain. Antigen-binding antibody fragments, including single-chain antibodies, may comprise the variable region(s) alone or in combination with the entirety or a portion of the following: hinge region, CH1, CH2, and CH3 domains. Also included in the invention are antigen-binding fragments also comprising any combination of variable region(s) with a hinge region, CH1, CH2, and CH3 domains. The antibodies of the invention may be from any animal origin including birds and mammals. Preferably, the antibodies are human, murine (e.g., mouse and rat), donkey, ship rabbit, goat, guinea pig, camel, horse, or chicken. As used herein, “human” antibodies include antibodies having the amino acid sequence of a human immunoglobulin and include antibodies isolated from human immunoglobulin libraries or from animals transgenic for one or more human immunoglobulin and that do not express endogenous immunoglobulins, as described infra and, for example in, U.S. Pat. No. 5,939,598 by Kucherlapati et al.

[0758] The antibodies of the present invention may be monospecific, bispecific, trispecific or of greater multispecificity. Multispecific antibodies may be specific for different epitopes of a polypeptide of the present invention or may be specific for both a polypeptide of the present invention as well as for a heterologous epitope, such as a heterologous polypeptide or solid support material. See, e.g., PCT publications WO 93/17715; WO 92/08802; WO 91/00360, WO 92/05793; Tutt, et al., J. Immunol. 147:60-69 (1991); U.S. Pat. Nos. 4,474,893; 4,714,681; 4,925,648; 5,573,920; 5,601,819; Kostelny et al., J. Immunol. 148:1547-1553 (1992).

[0759] Antibodies of the present invention may be described or specified in terms of the epitope(s) or portion(s) of a polypeptide of the present invention which they recognize or specifically bind. The epitope(s) or polypeptide portion(s) may be specified as described herein, e.g., by N-terminal and C-terminal positions, by size in contiguous amino acid residues, or listed in the Tables and Figures. Antibodies which specifically bind any epitope or polypeptide of the present invention may also be excluded. Therefore, the present invention includes antibodies that specifically bind polypeptides of the present invention, and allows for the exclusion of the same.

[0760] Antibodies of the present invention may also be described or specified in terms of their cross-reactivity. Antibodies that do not bind any other analog, ortholog, or homologue of a polypeptide of the present invention are included. Antibodies that bind polypeptides with at least 95%, at least 90%, at least 85%, at least 80%, at least 75%, at least 70%, at least 65%, at least 60%, at least 55%, and at least 50% identity (as calculated using methods known in the art and described herein) to a polypeptide of the present invention are also included in the present invention. In specific embodiments, antibodies of the present invention cross-react with murine, rat and/or rabbit homologues of human proteins and the corresponding epitopes thereof. Antibodies that do not bind polypeptides with less than 95%, less than 90%, less than 85%, less than 80%, less than 75%, less than 70%, less than 65%, less than 60%, less than 55%, and less than 50% identity (as calculated using methods known in the art and described herein) to a polypeptide of the present invention are also included in the present invention. In a specific embodiment, the above-described cross-reactivity is with respect to any single specific antigenic or immunogenic polypeptide, or combination(s) of 2, 3, 4, 5, or more of the specific antigenic and/or immunogenic polypeptides disclosed herein. Further included in the present invention are antibodies which bind polypeptides encoded by polynucleotides which hybridize to a polynucleotide of the present invention under stringent hybridization conditions. (as described herein). Antibodies of the present invention may also be described or specified in terms of their binding affinity to a polypeptide of the invention. Preferred binding affinities include those with a dissociation constant or Kd less than 5×10-2 M, 10-2 M, 5×10-3 M, 10-3 M, 5×10-4 M, 10-4 M, 5×10-5 M, 10-5 M, 5×10-6 M, 10-6M, 5×10-7 M, 107 M, 5×10-8 M, 10-8 M, 5×10-9 M, 10-9 M, 5×10-10 M, 10-10 M, 5×10-11 M, 10-11 M, 5×10-12 M, 10-12 M, 5×10-13 M, 10-13 M, 5×10-14 M, 10-14 M, 5×10-15 M, or 10-15 M.

[0761] The invention also provides antibodies that competitively inhibit binding of an antibody to an epitope of the invention as determined by any method known in the art for determining competitive binding, for example, the immunoassays described herein. In preferred embodiments, the antibody competitively inhibits binding to the epitope by at least 95%, at least 90%, at least 85%, at least 80%, at least 75%, at least 70%, at least 60%, or at least 50%.

[0762] Antibodies of the present invention may act as agonists or antagonists of the polypeptides of the present invention. For example, the present invention includes antibodies which disrupt the receptor/ligand interactions with the polypeptides of the invention either partially or fully. Preferably, antibodies of the present invention bind an antigenic epitope disclosed herein, or a portion thereof. The invention features both receptor-specific antibodies and ligand-specific antibodies. The invention also features receptor-specific antibodies which do not prevent ligand binding but prevent receptor activation. Receptor activation (i.e., signaling) may be determined by techniques described herein or otherwise known in the art. For example, receptor activation can be determined by detecting the phosphorylation (e.g., tyrosine or serine/threonine) of the receptor or its substrate by immunoprecipitation followed by western blot analysis (for example, as described supra). In specific embodiments, antibodies are provided that inhibit ligand activity or receptor activity by at least 95%, at least 90%, at least 85%, at least 80%, at least 75%, at least 70%, at least 60%, or at least 50% of the activity in absence of the antibody.

[0763] The invention also features receptor-specific antibodies which both prevent ligand binding and receptor activation as well as antibodies that recognize the receptor-ligand complex, and, preferably, do not specifically recognize the unbound receptor or the unbound ligand. Likewise, included in the invention are neutralizing antibodies which bind the ligand and prevent binding of the ligand to the receptor, as well as antibodies which bind the ligand, thereby preventing receptor activation, but do not prevent the ligand from binding the receptor. Further included in the invention are antibodies which activate the receptor. These antibodies may act as receptor agonists, i.e., potentiate or activate either all or a subset of the biological activities of the ligand-mediated receptor activation, for example, by inducing dimerization of the receptor. The antibodies may be specified as agonists, antagonists or inverse agonists for biological activities comprising the specific biological activities of the peptides of the invention disclosed herein. The above antibody agonists can be made using methods known in the art. See, e.g., PCT publication WO 96/40281; U.S. Pat. No. 5,811,097; Deng et al., Blood 92(6):1981-1988 (1998); Chen et al., Cancer Res. 58(16):3668-3678 (1998); Harrop et al., J. Immunol. 161(4):1786-1794 (1998); Zhu et al., Cancer Res. 58(15):3209-3214 (1998); Yoon et al., J. Immunol. 160(7):3170-3179 (1998); Prat et al., J. Cell. Sci. 111(Pt2):237-247 (1998); Pitard et al., J. Immunol. Methods 205(2):177-190 (1997); Liautard et al., Cytokine 9(4):233-241 (1997); Carlson et al., J. Biol. Chem. 272(17): 11295-11301 (1997); Taryman et al., Neuron 14(4):755-762 (1995); Muller et al., Structure 6(9):1153-1167 (1998); Bartunek et al., Cytokine 8(1):14-20 (1996) (which are all incorporated by reference herein in their entireties).

[0764] Antibodies of the present invention may be used, for example, but not limited to, to purify, detect, and target the polypeptides of the present invention, including both in vitro and in vivo diagnostic and therapeutic methods. For example, the antibodies have use in immunoassays for qualitatively and quantitatively measuring levels of the polypeptides of the present invention in biological samples. See, e.g., Harlow et al., Antibodies: A Laboratory Manual, (Cold Spring Harbor Laboratory Press, 2nd ed. 1988) (incorporated by reference herein in its entirety).

[0765] As discussed in more detail below, the antibodies of the present invention may be used either alone or in combination with other compositions. The antibodies may further be recombinantly fused to a heterologous polypeptide at the N- or C-terminus or chemically conjugated (including covalently and non-covalently conjugations) to polypeptides or other compositions. For example, antibodies of the present invention may be recombinantly fused or conjugated to molecules useful as labels in detection assays and effector molecules such as heterologous polypeptides, drugs, radionucleotides, or toxins. See, e.g., PCT publications WO 92/08495; WO 91/14438; WO 89/12624; U.S. Pat. No. 5,314,995; and EP 396,387.

[0766] The antibodies of the invention include derivatives that are modified, i.e., by the covalent attachment of any type of molecule to the antibody such that covalent attachment does not prevent the antibody from generating an anti-idiotypic response. For example, but not by way of limitation, the antibody derivatives include antibodies that have been modified, e.g., by glycosylation, acetylation, pegylation, phosphorylation, amidation, derivatization by known protecting/blocking groups, proteolytic cleavage, linkage to a cellular ligand or other protein, etc. Any of numerous chemical modifications may be carried out by known techniques, including, but not limited to specific chemical cleavage, acetylation, formylation, metabolic synthesis of tunicamycin, etc. Additionally, the derivative may contain one or more non-classical amino acids.

[0767] The antibodies of the present invention may be generated by any suitable method known in the art.

[0768] The antibodies of the present invention may comprise polyclonal antibodies. Methods of preparing polyclonal antibodies are known to the skilled artisan (Harlow, et al., Antibodies: A Laboratory Manual, (Cold spring Harbor Laboratory Press, ₂^{nd} ed. (1988); and Current Protocols, Chapter 2; which are hereby incorporated herein by reference in its entirety). In a preferred method, a preparation of the HGPRBMY30_{—}1, HGPRBMY30_{—}2, HGPRBMY30_{—}3, HGPRBMY41_{—}1, HGPRBMY41_{—}2, HGPRBMY41_{—}3, HGPRBMY42, HGPRBMY42_{—}1, HGPRBMY43, and/or HGPRBMY44 protein is prepared and purified to render it substantially free of natural contaminants. Such a preparation is then introduced into an animal in order to produce polyclonal antisera of greater specific activity. For example, a polypeptide of the invention can be administered to various host animals including, but not limited to, rabbits, mice, rats, etc. to induce the production of sera containing polyclonal antibodies specific for the antigen. The administration of the polypeptides of the present invention may entail one or more injections of an immunizing agent and, if desired, an adjuvant. Various adjuvants may be used to increase the immunological response, depending on the host species, and include but are not limited to, Freund's (complete and incomplete), mineral gels such as aluminum hydroxide, surface active substances such as lysolecithin, pluronic polyols, polyanions, peptides, oil emulsions, keyhole limpet hemocyanins, dinitrophenol, and potentially useful human adjuvants such as BCG (bacille Calmette-Guerin) and corynebacterium parvum. Such adjuvants are also well known in the art. For the purposes of the invention, “immunizing agent” may be defined as a polypeptide of the invention, including fragments, variants, and/or derivatives thereof, in addition to fusions with heterologous polypeptides and other forms of the polypeptides described herein.

[0769] Typically, the immunizing agent and/or adjuvant will be injected in the mammal by multiple subcutaneous or intraperitoneal injections, though they may also be given intramuscularly, and/or through IV). The immunizing agent may include polypeptides of the present invention or a fusion protein or variants thereof. Depending upon the nature of the polypeptides (i.e., percent hydrophobicity, percent hydrophilicity, stability, net charge, isoelectric point etc.), it may be useful to conjugate the immunizing agent to a protein known to be immunogenic in the mammal being immunized. Such conjugation includes either chemical conjugation by derivitizing active chemical functional groups to both the polypeptide of the present invention and the immunogenic protein such that a covalent bond is formed, or through fusion-protein based methodology, or other methods known to the skilled artisan. Examples of such immunogenic proteins include, but are not limited to keyhole limpet hemocyanin, serum albumin, bovine thyroglobulin, and soybean trypsin inhibitor. Various adjuvants may be used to increase the immunological response, depending on the host species, including but not limited to Freund's (complete and incomplete), mineral gels such as aluminum hydroxide, surface active substances such as lysolecithin, pluronic polyols, polyanions, peptides, oil emulsions, keyhole limpet hemocyanin, dinitrophenol, and potentially useful human adjuvants such as BCG (bacille Calmette-Guerin) and Corynebacterium parvum. Additional examples of adjuvants which may be employed includes the MPL-TDM adjuvant (monophosphoryl lipid A, synthetic trehalose dicorynomycolate). The immunization protocol may be selected by one skilled in the art without undue experimentation.

[0770] The antibodies of the present invention may comprise monoclonal antibodies. Monoclonal antibodies may be prepared using hybridoma methods, such as those described by Kohler and Milstein, Nature, 256:495 (1975) and U.S. Pat. No. 4,376,110, by Harlow, et al., Antibodies: A Laboratory Manual, (Cold spring Harbor Laboratory Press, ₂^{nd} ed. (1988), by Hammerling, et al., Monoclonal Antibodies and T-Cell Hybridomas (Elsevier, N.Y., pp. 563-681 (1981); Köhler et al., Eur. J. Immunol. 6:511 (1976); Köhler et al., Eur. J. Immunol. 6:292 (1976), or other methods known to the artisan. Other examples of methods which may be employed for producing monoclonal antibodies includes, but are not limited to, the human B-cell hybridoma technique (Kosbor et al., 1983, Immunology Today 4:72; Cole et al., 1983, Proc. Natl. Acad. Sci. USA 80:2026-2030), and the EBV-hybridoma technique (Cole et al., 1985, Monoclonal Antibodies And Cancer Therapy, Alan R. Liss, Inc., pp. 77-96). Such antibodies may be of any immunoglobulin class including IgG, IgM, IgE, IgA, IgD and any subclass thereof. The hybridoma producing the mAb of this invention may be cultivated in vitro or in vivo. Production of high titers of mAbs in vivo makes this the presently preferred method of production.

[0771] In a hybridoma method, a mouse, a humanized mouse, a mouse with a human immune system, hamster, or other appropriate host animal, is typically immunized with an immunizing agent to elicit lymphocytes that produce or are capable of producing antibodies that will specifically bind to the immunizing agent. Alternatively, the lymphocytes may be immunized in vitro.

[0772] The immunizing agent will typically include polypeptides of the present invention or a fusion protein thereof. Preferably, the immunizing agent consists of an HGPRBMY30_{—}1, HGPRBMY30_{—}2, HGPRBMY30_{—}3, HGPRBMY41_{—}1, HGPRBMY41_{—}2, HGPRBMY41_{—}3, HGPRBMY42, HGPRBMY42_{—}1, HGPRBMY43, and/or HGPRBMY44 polypeptide or, more preferably, with a HGPRBMY30_{—}1, HGPRBMY30_{—}2, HGPRBMY30_{—}3, HGPRBMY41_{—}1, HGPRBMY41_{—}2, HGPRBMY41_{—}3, HGPRBMY42, HGPRBMY42_{—}1, HGPRBMY43, and/or HGPRBMY44 polypeptide-expressing cell. Such cells may be cultured in any suitable tissue culture medium; however, it is preferable to culture cells in Earle's modified Eagle's medium supplemented with 10% fetal bovine serum (inactivated at about 56 degrees C.), and supplemented with about 10 g/l of nonessential amino acids, about 1,000 U/ml of penicillin, and about 100 ug/ml of streptomycin. Generally, either peripheral blood lymphocytes (“PBLs”) are used if cells of human origin are desired, or spleen cells or lymph node cells are used if non-human mammalian sources are desired. The lymphocytes are then fused with an immortalized cell line using a suitable fusing agent, such as polyethylene glycol, to form a hybridoma cell (Goding, Monoclonal Antibodies: Principles and Practice, Academic Press, (1986), pp. 59-103). Immortalized cell lines are usually transformed mammalian cells, particularly myeloma cells of rodent, bovine and human origin. Usually, rat or mouse myeloma cell lines are employed. The hybridoma cells may be cultured in a suitable culture medium that preferably contains one or more substances that inhibit the growth or survival of the unfused, immortalized cells. For example, if the parental cells lack the enzyme hypoxanthine guanine phosphoribosyl transferase (HGPRT or HPRT), the culture medium for the hybridomas typically will include hypoxanthine, aminopterin, and thymidine (“HAT medium”), which substances prevent the growth of HGPRT-deficient cells.

[0773] Preferred immortalized cell lines are those that fuse efficiently, support stable high level expression of antibody by the selected antibody-producing cells, and are sensitive to a medium such as HAT medium. More preferred immortalized cell lines are murine myeloma lines, which can be obtained, for instance, from the Salk Institute Cell Distribution Center, San Diego, Calif. and the American Type Culture Collection, Manassas, Va.. More preferred are the parent myeloma cell line (SP20) as provided by the ATCC. As inferred throughout the specification, human myeloma and mouse-human heteromyeloma cell lines also have been described for the production of human monoclonal antibodies (Kozbor, J. Immunol., 133:3001 (1984); Brodeur et al., Monoclonal Antibody Production Techniques and Applications, Marcel Dekker, Inc., New York, (1987) pp. 51-63).

[0774] The culture medium in which the hybridoma cells are cultured can then be assayed for the presence of monoclonal antibodies directed against the polypeptides of the present invention. Preferably, the binding specificity of monoclonal antibodies produced by the hybridoma cells is determined by immunoprecipitation or by an in vitro binding assay, such as radioimmunoassay (RIA) or enzyme-linked immunoabsorbant assay (ELISA). Such techniques are known in the art and within the skill of the artisan. The binding affinity of the monoclonal antibody can, for example, be determined by the Scatchard analysis of Munson and Pollart, Anal. Biochem., 107:220 (1980).

[0775] After the desired hybridoma cells are identified, the clones may be subcloned by limiting dilution procedures and grown by standard methods (Goding, supra, and/or according to Wands et al. (Gastroenterology 80:225-232 (1981)). Suitable culture media for this purpose include, for example, Dulbecco's Modified Eagle's Medium and RPMI-1640. Alternatively, the hybridoma cells may be grown in vivo as ascites in a mammal.

[0776] The monoclonal antibodies secreted by the subclones may be isolated or purified from the culture medium or ascites fluid by conventional immunoglobulin purification procedures such as, for example, protein A-sepharose, hydroxyapatite chromatography, gel exclusion chromatography, gel electrophoresis, dialysis, or affinity chromatography.

[0777] The skilled artisan would acknowledge that a variety of methods exist in the art for the production of monoclonal antibodies and thus, the invention is not limited to their sole production in hydridomas. For example, the monoclonal antibodies may be made by recombinant DNA methods, such as those described in U.S. Pat. No. 4,816,567. In this context, the term “monoclonal antibody” refers to an antibody derived from a single eukaryotic, phage, or prokaryotic clone. The DNA encoding the monoclonal antibodies of the invention can be readily isolated and sequenced using conventional procedures (e.g., by using oligonucleotide probes that are capable of binding specifically to genes encoding the heavy and light chains of murine antibodies, or such chains from human, humanized, or other sources). The hydridoma cells of the invention serve as a preferred source of such DNA. Once isolated, the DNA may be placed into expression vectors, which are then transformed into host cells such as Simian COS cells, Chinese hamster ovary (CHO) cells, or myeloma cells that do not otherwise produce immunoglobulin protein, to obtain the synthesis of monoclonal antibodies in the recombinant host cells. The DNA also may be modified, for example, by substituting the coding sequence for human heavy and light chain constant domains in place of the homologous murine sequences (U.S. Pat. No. 4,816,567; Morrison et al, supra) or by covalently joining to the immunoglobulin coding sequence all or part of the coding sequence for a non-immunoglobulin polypeptide. Such a non-immunoglobulin polypeptide can be substituted for the constant domains of an antibody of the invention, or can be substituted for the variable domains of one antigen-combining site of an antibody of the invention to create a chimeric bivalent antibody.

[0778] The antibodies may be monovalent antibodies. Methods for preparing monovalent antibodies are well known in the art. For example, one method involves recombinant expression of immunoglobulin light chain and modified heavy chain. The heavy chain is truncated generally at any point in the Fc region so as to prevent heavy chain crosslinking. Alternatively, the relevant cysteine residues are substituted with another amino acid residue or are deleted so as to prevent crosslinking.

[0779] In vitro methods are also suitable for preparing monovalent antibodies. Digestion of antibodies to produce fragments thereof, particularly, Fab fragments, can be accomplished using routine techniques known in the art. Monoclonal antibodies can be prepared using a wide variety of techniques known in the art including the use of hybridoma, recombinant, and phage display technologies, or a combination thereof. For example, monoclonal antibodies can be produced using hybridoma techniques including those known in the art and taught, for example, in Harlow et al., Antibodies: A Laboratory Manual, (Cold Spring Harbor Laboratory Press, 2nd ed. 1988); Hammerling, et al., in: Monoclonal Antibodies and T-Cell Hybridomas 563-681 (Elsevier, N.Y., 1981) (said references incorporated by reference in their entireties). The term “monoclonal antibody” as used herein is not limited to antibodies produced through hybridoma technology. The term “monoclonal antibody” refers to an antibody that is derived from a single clone, including any eukaryotic, prokaryotic, or phage clone, and not the method by which it is produced.

[0780] Methods for producing and screening for specific antibodies using hybridoma technology are routine and well known in the art and are discussed in detail in the Examples described herein. In a non-limiting example, mice can be immunized with a polypeptide of the invention or a cell expressing such peptide. Once an immune response is detected, e.g., antibodies specific for the antigen are detected in the mouse serum, the mouse spleen is harvested and splenocytes isolated. The splenocytes are then fused by well known techniques to any suitable myeloma cells, for example cells from cell line SP20 available from the ATCC. Hybridomas are selected and cloned by limited dilution. The hybridoma clones are then assayed by methods known in the art for cells that secrete antibodies capable of binding a polypeptide of the invention. Ascites fluid, which generally contains high levels of antibodies, can be generated by immunizing mice with positive hybridoma clones.

[0781] Accordingly, the present invention provides methods of generating monoclonal antibodies as well as antibodies produced by the method comprising culturing a hybridoma cell secreting an antibody of the invention wherein, preferably, the hybridoma is generated by fusing splenocytes isolated from a mouse immunized with an antigen of the invention with myeloma cells and then screening the hybridomas resulting from the fusion for hybridoma clones that secrete an antibody able to bind a polypeptide of the invention.

[0782] Antibody fragments which recognize specific epitopes may be generated by known techniques. For example, Fab and F(ab′)2 fragments of the invention may be produced by proteolytic cleavage of immunoglobulin molecules, using enzymes such as papain (to produce Fab fragments) or pepsin (to produce F(ab′)2 fragments). F(ab′)2 fragments contain the variable region, the light chain constant region and the CH1 domain of the heavy chain.

[0783] For example, the antibodies of the present invention can also be generated using various phage display methods known in the art. In phage display methods, functional antibody domains are displayed on the surface of phage particles which carry the polynucleotide sequences encoding them. In a particular embodiment, such phage can be utilized to display antigen binding domains expressed from a repertoire or combinatorial antibody library (e.g., human or murine). Phage expressing an antigen binding domain that binds the antigen of interest can be selected or identified with antigen, e.g., using labeled antigen or antigen bound or captured to a solid surface or bead. Phage used in these methods are typically filamentous phage including fd and M13 binding domains expressed from phage with Fab, Fv or disulfide stabilized Fv antibody domains recombinantly fused to either the phage gene III or gene VIII protein. Examples of phage display methods that can be used to make the antibodies of the present invention include those disclosed in Brinkman et al., J. Immunol. Methods 182:41-50 (1995); Ames et al., J. Immunol. Methods 184:177-186 (1995); Kettleborough et al., Eur. J. Immunol. 24:952-958 (1994); Persic et al., Gene 187 9-18 (1997); Burton et al., Advances in Immunology 57:191-280 (1994); PCT application No. PCT/GB91/01134; PCT publications WO 90/02809; WO 91/10737; WO 92/01047; WO 92/18619; WO 93/11236; WO 95/15982; WO 95/20401; and U.S. Pat. Nos. 5,698,426; 5,223,409; 5,403,484; 5,580,717; 5,427,908; 5,750,753; 5,821,047; 5,571,698; 5,427,908; 5,516,637; 5,780,225; 5,658,727; 5,733,743 and 5,969,108; each of which is incorporated herein by reference in its entirety.

[0784] As described in the above references, after phage selection, the antibody coding regions from the phage can be isolated and used to generate whole antibodies, including human antibodies, or any other desired antigen binding fragment, and expressed in any desired host, including mammalian cells, insect cells, plant cells, yeast, and bacteria, e.g., as described in detail below. For example, techniques to recombinantly produce Fab, Fab′ and F(ab′)2 fragments can also be employed using methods known in the art such as those disclosed in PCT publication WO 92/22324; Mullinax et al., BioTechniques 12(6):864-869 (1992); and Sawai et al., AJRI 34:26-34 (1995); and Better et al., Science 240:1041-1043 (1988) (said references incorporated by reference in their entireties). Examples of techniques which can be used to produce single-chain Fvs and antibodies include those described in U.S. Pat. Nos. 4,946,778 and 5,258,498; Huston et al., Methods in Enzymology 203:46-88 (1991); Shu et al., PNAS 90:7995-7999 (1993); and Skerra et al., Science 240:1038-1040 (1988).

[0785] For some uses, including in vivo use of antibodies in humans and in vitro detection assays, it may be preferable to use chimeric, humanized, or human antibodies. A chimeric antibody is a molecule in which different portions of the antibody are derived from different animal species, such as antibodies having a variable region derived from a murine monoclonal antibody and a human immunoglobulin constant region. Methods for producing chimeric antibodies are known in the art. See e.g., Morrison, Science 229:1202 (1985); Oi et al., BioTechniques 4:214 (1986); Gillies et al., (1989) J. Immunol. Methods 125:191-202; Cabilly et al., Taniguchi et al., EP 171496; Morrison et al., EP 173494; Neuberger et al., WO 8601533; Robinson et al., WO 8702671; Boulianne et al., Nature 312:643 (1984); Neuberger et al., Nature 314:268 (1985); U.S. Pat. Nos. 5,807,715; 4,816,567; and 4,816397, which are incorporated herein by reference in their entirety. Humanized antibodies are antibody molecules from non-human species antibody that binds the desired antigen having one or more complementarity determining regions (CDRs) from the non-human species and a framework regions from a human immunoglobulin molecule. Often, framework residues in the human framework regions will be substituted with the corresponding residue from the CDR donor antibody to alter, preferably improve, antigen binding. These framework substitutions are identified by methods well known in the art, e.g., by modeling of the interactions of the CDR and framework residues to identify framework residues important for antigen binding and sequence comparison to identify unusual framework residues at particular positions. (See, e.g., Queen et al., U.S. Pat. No. 5,585,089; Riechmann et al., Nature 332:323 (1988), which are incorporated herein by reference in their entireties.) Antibodies can be humanized using a variety of techniques known in the art including, for example, CDR-grafting (EP 239,400; PCT publication WO 91/09967; U.S. Pat. Nos. 5,225,539; 5,530,101; and 5,585,089), veneering or resurfacing (EP 592,106; EP 519,596; Padlan, Molecular Immunology 28(4/5):489-498 (1991); Studnicka et al., Protein Engineering 7(6):805-814 (1994); Roguska. et al., PNAS 91:969-973 (1994)), and chain shuffling (U.S. Pat. No. 5,565,332). Generally, a humanized antibody has one or more amino acid residues introduced into it from a source that is non-human. These non-human amino acid residues are often referred to as “import” residues, which are typically taken from an “import” variable domain. Humanization can be essentially performed following the methods of Winter and co-workers (Jones et al., Nature, 321:522-525 (1986); Reichmann et al., Nature, 332:323-327 (1988); Verhoeyen et al., Science, 239:1534-1536 (1988), by substituting rodent CDRs or CDR sequences for the corresponding sequences of a human antibody. Accordingly, such “humanized” antibodies are chimeric antibodies (U.S. Pat. No. 4,816,567), wherein substantially less than an intact human variable domain has been substituted by the corresponding sequence from a non-human species. In practice, humanized antibodies are typically human antibodies in which some CDR residues and possible some FR residues are substituted from analogous sites in rodent antibodies.

[0786] In general, the humanized antibody will comprise substantially all of at least one, and typically two, variable domains, in which all or substantially all of the CDR regions correspond to those of a non-human immunoglobulin and all or substantially all of the FR regions are those of a human immunoglobulin consensus sequence. The humanized antibody optimally also will comprise at least a portion of an immunoglobulin constant region (Fc), typically that of a human immunoglobulin (Jones et al., Nature, 321:522-525 (1986); Riechmann et al., Nature 332:323-329 (1988)1 and Presta, Curr. Op. Struct. Biol., 2:593-596 (1992).

[0787] Completely human antibodies are particularly desirable for therapeutic treatment of human patients. Human antibodies can be made by a variety of methods known in the art including phage display methods described above using antibody libraries derived from human immunoglobulin sequences. See also, U.S. Pat. Nos. 4,444,887 and 4,716,111; and PCT publications WO 98/46645, WO 98/50433, WO 98/24893, WO 98/16654, WO 96/34096, WO 96/33735, and WO 91/10741; each of which is incorporated herein by reference in its entirety. The techniques of cole et al., and Boerder et al., are also available for the preparation of human monoclonal antibodies (cole et al., Monoclonal Antibodies and Cancer Therapy, Alan R. Riss, (1985); and Boerner et al., J. Immunol., 147(1):86-95, (1991)).

[0788] Human antibodies can also be produced using transgenic mice which are incapable of expressing functional endogenous immunoglobulins, but which can express human immunoglobulin genes. For example, the human heavy and light chain immunoglobulin gene complexes may be introduced randomly or by homologous recombination into mouse embryonic stem cells. Alternatively, the human variable region, constant region, and diversity region may be introduced into mouse embryonic stem cells in addition to the human heavy and light chain genes. The mouse heavy and light chain immunoglobulin genes may be rendered non-functional separately or simultaneously with the introduction of human immunoglobulin loci by homologous recombination. In particular, homozygous deletion of the JH region prevents endogenous antibody production. The modified embryonic stem cells are expanded and microinjected into blastocysts to produce chimeric mice. The chimeric mice are then bred to produce homozygous offspring which express human antibodies. The transgenic mice are immunized in the normal fashion with a selected antigen, e.g., all or a portion of a polypeptide of the invention. Monoclonal antibodies directed against the antigen can be obtained from the immunized, transgenic mice using conventional hybridoma technology. The human immunoglobulin transgenes harbored by the transgenic mice rearrange during B cell differentiation, and subsequently undergo class switching and somatic mutation. Thus, using such a technique, it is possible to produce therapeutically useful IgG, IgA, IgM and IgE antibodies. For an overview of this technology for producing human antibodies, see Lonberg and Huszar, Int. Rev. Immunol. 13:65-93 (1995). For a detailed discussion of this technology for producing human antibodies and human monoclonal antibodies and protocols for producing such antibodies, see, e.g., PCT publications WO 98/24893; WO 92/01047; WO 96/34096; WO 96/33735; European Patent No. 0 598 877; U.S. Pat. Nos. 5,413,923; 5,625,126; 5,633,425; 5,569,825; 5,661,016; 5,545,806; 5,814,318; 5,885,793; 5,916,771; and 5,939,598, which are incorporated by reference herein in their entirety. In addition, companies such as Abgenix, Inc. (Freemont, Calif.), Genpharm (San Jose, Calif.), and Medarex, Inc. (Princeton, N.J.) can be engaged to provide human antibodies directed against a selected antigen using technology similar to that described above.

[0789] Similarly, human antibodies can be made by introducing human immunoglobulin loci into transgenic animals, e.g., mice in which the endogenous immunoglobulin genes have been partially or completely inactivated. Upon challenge, human antibody production is observed, which closely resembles that seen in humans in all respects, including gene rearrangement, assembly, and creation of an antibody repertoire. This approach is described, for example, in U.S. Pat. Nos. 5,545,807; 5,545,806; 5,569,825; 5,625,126; 5,633,425; 5,661,106, and in the following scientific publications: Marks et al., Biotechnol., 10:779-783 (1992); Lonberg et al., Nature 368:856-859 (1994); Fishwild et al., Nature Biotechnol., 14:845-51 (1996); Neuberger, Nature Biotechnol., 14:826 (1996); Lonberg and Huszer, Intern. Rev. Immunol., 13:65-93 (1995).

[0790] Completely human antibodies which recognize a selected epitope can be generated using a technique referred to as “guided selection.” In this approach a selected non-human monoclonal antibody, e.g., a mouse antibody, is used to guide the selection of a completely human antibody recognizing the same epitope. (Jespers et al., Bio/technology 12:899-903 (1988)).

[0791] Further, antibodies to the polypeptides of the invention can, in turn, be utilized to generate anti-idiotype antibodies that “mimic” polypeptides of the invention using techniques well known to those skilled in the art. (See, e.g., Greenspan & Bona, FASEB J. 7(5):437-444; (1989) and Nissinoff, J. Immunol. 147(8):2429-2438 (1991)). For example, antibodies which bind to and competitively inhibit polypeptide multimerization and/or binding of a polypeptide of the invention to a ligand can be used to generate anti-idiotypes that “mimic” the polypeptide multimerization and/or binding domain and, as a consequence, bind to and neutralize polypeptide and/or its ligand. Such neutralizing anti-idiotypes or Fab fragments of such anti-idiotypes can be used in therapeutic regimens to neutralize polypeptide ligand. For example, such anti-idiotypic antibodies can be used to bind a polypeptide of the invention and/or to bind its ligands/receptors, and thereby block its biological activity.

[0792] Such anti-idiotypic antibodies capable of binding to the HGPRBMY30_{—}1, HGPRBMY30_{—}2, HGPRBMY30_{—}3, HGPRBMY41_{—}1, HGPRBMY41_{—}2, HGPRBMY41_{—}3, HGPRBMY42, HGPRBMY42_{—}1, HGPRBMY43, and/or HGPRBMY44 polypeptide can be produced in a two-step procedure. Such a method makes use of the fact that antibodies are themselves antigens, and therefore, it is possible to obtain an antibody that binds to a second antibody. In accordance with this method, protein specific antibodies are used to immunize an animal, preferably a mouse. The splenocytes of such an animal are then used to produce hybridoma cells, and the hybridoma cells are screened to identify clones that produce an antibody whose ability to bind to the protein-specific antibody can be blocked by the polypeptide. Such antibodies comprise anti-idiotypic antibodies to the protein-specific antibody and can be used to immunize an animal to induce formation of further protein-specific antibodies.

[0793] The antibodies of the present invention may be bispecific antibodies. Bispecific antibodies are monoclonal, Preferably human or humanized, antibodies that have binding specificities for at least two different antigens. In the present invention, one of the binding specificities may be directed towards a polypeptide of the present invention, the other may be for any other antigen, and preferably for a cell-surface protein, receptor, receptor subunit, tissue-specific antigen, virally derived protein, virally encoded envelope protein, bacterially derived protein, or bacterial surface protein, etc.

[0794] Methods for making bispecific antibodies are known in the art. Traditionally, the recombinant production of bispecific antibodies is based on the co-expression of two immunoglobulin heavy-chain/light-chain pairs, where the two heavy chains have different specificities (Milstein and Cuello, Nature, 305:537-539 (1983). Because of the random assortment of immunoglobulin heavy and light chains, these hybridomas (quadromas) produce a potential mixture of ten different antibody molecules, of which only one has the correct bispecific structure. The purification of the correct molecule is usually accomplished by affinity chromatography steps. Similar procedures are disclosed in WO 93/08829, published May 13, 1993, and in Traunecker et al., EMBO J., 10:3655-3659 (1991).

[0795] Antibody variable domains with the desired binding specificities (antibody-antigen combining sites) can be fused to immunoglobulin constant domain sequences. The fusion preferably is with an immunoglobulin heavy-chain constant domain, comprising at least part of the hinge, CH2, and CH3 regions. It is preferred to have the first heavy-chain constant region (CH1) containing the site necessary for light-chain binding present in at least one of the fusions. DNAs encoding the immunoglobulin heavy-chain fusions and, if desired, the immunoglobulin light chain, are inserted into separate expression vectors, and are co-transformed into a suitable host organism. For further details of generating bispecific antibodies see, for example Suresh et al., Meth. In Enzym., 121:210 (1986).

[0796] Heteroconjugate antibodies are also contemplated by the present invention. Heteroconjugate antibodies are composed of two covalently joined antibodies. Such antibodies have, for example, been proposed to target immune system cells to unwanted cells (U.S. Pat. No. 4,676,980), and for the treatment of HIV infection (WO 91/00360; WO 92/20373; and EP03089). It is contemplated that the antibodies may be prepared in vitro using known methods in synthetic protein chemistry, including those involving crosslinking agents. For example, immunotoxins may be constructed using a disulfide exchange reaction or by forming a thioester bond. Examples of suitable reagents for this purpose include iminothiolate and methyl-4-mercaptobutyrimidate and those disclosed, for example, in U.S. Pat. No. 4,676,980.

[0797] Polynucleotides Encoding Antibodies

[0798] The invention further provides polynucleotides comprising a nucleotide sequence encoding an antibody of the invention and fragments thereof. The invention also encompasses polynucleotides that hybridize under stringent or lower stringency hybridization conditions, e.g., as defined supra, to polynucleotides that encode an antibody, preferably, that specifically binds to a polypeptide of the invention, preferably, an antibody that binds to a polypeptide having the amino acid sequence of SEQ ID NO:2, SEQ ID NO:4, SEQ ID NO:6, SEQ ID NO:8, SEQ ID NO:10, SEQ ID NO:12, SEQ ID NO:14, SEQ ID NO:16, SEQ ID NO:18, and/or SEQ ID NO:20.

[0799] The polynucleotides may be obtained, and the nucleotide sequence of the polynucleotides determined, by any method known in the art. For example, if the nucleotide sequence of the antibody is known, a polynucleotide encoding the antibody may be assembled from chemically synthesized oligonucleotides (e.g., as described in Kutmeier et al., BioTechniques 17:242 (1994)), which, briefly, involves the synthesis of overlapping oligonucleotides containing portions of the sequence encoding the antibody, annealing and ligating of those oligonucleotides, and then amplification of the ligated oligonucleotides by PCR.

[0800] Alternatively, a polynucleotide encoding an antibody may be generated from nucleic acid from a suitable source. If a clone containing a nucleic acid encoding a particular antibody is not available, but the sequence of the antibody molecule is known, a nucleic acid encoding the immunoglobulin may be chemically synthesized or obtained from a suitable source (e.g., an antibody cDNA library, or a cDNA library generated from, or nucleic acid, preferably poly A+ RNA, isolated from, any tissue or cells expressing the antibody, such as hybridoma cells selected to express an antibody of the invention) by PCR amplification using synthetic primers hybridizable to the 3′ and 5′ ends of the sequence or by cloning using an oligonucleotide probe specific for the particular gene sequence to identify, e.g., a cDNA clone from a cDNA library that encodes the antibody. Amplified nucleic acids generated by PCR may then be cloned into replicable cloning vectors using any method well known in the art.

[0801] Once the nucleotide sequence and corresponding amino acid sequence of the antibody is determined, the nucleotide sequence of the antibody may be manipulated using methods well known in the art for the manipulation of nucleotide sequences, e.g., recombinant DNA techniques, site directed mutagenesis, PCR, etc. (see, for example, the techniques described in Sambrook et al., 1990, Molecular Cloning, A Laboratory Manual, 2d Ed., Cold Spring Harbor Laboratory, Cold Spring Harbor, N.Y. and Ausubel et al., eds., 1998, Current Protocols in Molecular Biology, John Wiley & Sons, NY, which are both incorporated by reference herein in their entireties ), to generate antibodies having a different amino acid sequence, for example to create amino acid substitutions, deletions, and/or insertions.

[0802] In a specific embodiment, the amino acid sequence of the heavy and/or light chain variable domains may be inspected to identify the sequences of the complementarity determining regions (CDRs) by methods that are well know in the art, e.g., by comparison to known amino acid sequences of other heavy and light chain variable regions to determine the regions of sequence hypervariability. Using routine recombinant DNA techniques, one or more of the CDRs may be inserted within framework regions, e.g., into human framework regions to humanize a non-human antibody, as described supra. The framework regions may be naturally occurring or consensus framework regions, and preferably human framework regions (see, e.g., Chothia et al., J. Mol. Biol. 278: 457-479 (1998) for a listing of human framework regions). Preferably, the polynucleotide generated by the combination of the framework regions and CDRs encodes an antibody that specifically binds a polypeptide of the invention. Preferably, as discussed supra, one or more amino acid substitutions may be made within the framework regions, and, preferably, the amino acid substitutions improve binding of the antibody to its antigen. Additionally, such methods may be used to make amino acid substitutions or deletions of one or more variable region cysteine residues participating in an intrachain disulfide bond to generate antibody molecules lacking one or more intrachain disulfide bonds. Other alterations to the polynucleotide are encompassed by the present invention and within the skill of the art.

[0803] In addition, techniques developed for the production of “chimeric antibodies” (Morrison et al., Proc. Natl. Acad. Sci. 81:851-855 (1984); Neuberger et al., Nature 312:604-608 (1984); Takeda et al., Nature 314:452-454 (1985)) by splicing genes from a mouse antibody molecule of appropriate antigen specificity together with genes from a human antibody molecule of appropriate biological activity can be used. As described supra, a chimeric antibody is a molecule in which different portions are derived from different animal species, such as those having a variable region derived from a murine mAb and a human immunoglobulin constant region, e.g., humanized antibodies.

[0804] Alternatively, techniques described for the production of single chain antibodies (U.S. Pat. No. 4,946,778; Bird, Science 242:423-42 (1988); Huston et al., Proc. Natl. Acad. Sci. USA 85:5879-5883 (1988); and Ward et al., Nature 334:544-54 (1989)) can be adapted to produce single chain antibodies. Single chain antibodies are formed by linking the heavy and light chain fragments of the Fv region via an amino acid bridge, resulting in a single chain polypeptide. Techniques for the assembly of functional Fv fragments in E. coli may also be used (Skerra et al., Science 242:1038-1041 (1988)).

[0805] More preferably, a clone encoding an antibody of the present invention may be obtained according to the method described in the Example section herein.

[0806] Methods of Producing Antibodies

[0807] The antibodies of the invention can be produced by any method known in the art for the synthesis of antibodies, in particular, by chemical synthesis or preferably, by recombinant expression techniques.

[0808] Recombinant expression of an antibody of the invention, or fragment, derivative or analog thereof, (e.g., a heavy or light chain of an antibody of the invention or a single chain antibody of the invention), requires construction of an expression vector containing a polynucleotide that encodes the antibody. Once a polynucleotide encoding an antibody molecule or a heavy or light chain of an antibody, or portion thereof (preferably containing the heavy or light chain variable domain), of the invention has been obtained, the vector for the production of the antibody molecule may be produced by recombinant DNA technology using techniques well known in the art. Thus, methods for preparing a protein by expressing a polynucleotide containing an antibody encoding nucleotide sequence are described herein. Methods which are well known to those skilled in the art can be used to construct expression vectors containing antibody coding sequences and appropriate transcriptional and translational control signals. These methods include, for example, in vitro recombinant DNA techniques, synthetic techniques, and in vivo genetic recombination. The invention, thus, provides replicable vectors comprising a nucleotide sequence encoding an antibody molecule of the invention, or a heavy or light chain thereof, or a heavy or light chain variable domain, operably linked to a promoter. Such vectors may include the nucleotide sequence encoding the constant region of the antibody molecule (see, e.g., PCT Publication WO 86/05807; PCT Publication WO 89/01036; and U.S. Pat. No. 5,122,464) and the variable domain of the antibody may be cloned into such a vector for expression of the entire heavy or light chain.

[0809] The expression vector is transferred to a host cell by conventional techniques and the transfected cells are then cultured by conventional techniques to produce an antibody of the invention. Thus, the invention includes host cells containing a polynucleotide encoding an antibody of the invention, or a heavy or light chain thereof, or a single chain antibody of the invention, operably linked to a heterologous promoter. In preferred embodiments for the expression of double-chained antibodies, vectors encoding both the heavy and light chains may be co-expressed in the host cell for expression of the entire immunoglobulin molecule, as detailed below.

[0810] A variety of host-expression vector systems may be utilized to express the antibody molecules of the invention. Such host-expression systems represent vehicles by which the coding sequences of interest may be produced and subsequently purified, but also represent cells which may, when transformed or transfected with the appropriate nucleotide coding sequences, express an antibody molecule of the invention in situ. These include but are not limited to microorganisms such as bacteria (e.g., E. coli, B. subtilis) transformed with recombinant bacteriophage DNA, plasmid DNA or cosmid DNA expression vectors containing antibody coding sequences; yeast (e.g., Saccharomyces, Pichia) transformed with recombinant yeast expression vectors containing antibody coding sequences; insect cell systems infected with recombinant virus expression vectors (e.g., baculovirus) containing antibody coding sequences; plant cell systems infected with recombinant virus expression vectors (e.g., cauliflower mosaic virus, CaMV; tobacco mosaic virus, TMV) or transformed with recombinant plasmid expression vectors (e.g., Ti plasmid) containing antibody coding sequences; or mammalian cell systems (e.g., COS, CHO, BHK, 293, 3T3 cells) harboring recombinant expression constructs containing promoters derived from the genome of mammalian cells (e.g., metallothionein promoter) or from mammalian viruses (e.g., the adenovirus late promoter; the vaccinia virus 7.5K promoter). Preferably, bacterial cells such as Escherichia coli, and more preferably, eukaryotic cells, especially for the expression of whole recombinant antibody molecule, are used for the expression of a recombinant antibody molecule. For example, mammalian cells such as Chinese hamster ovary cells (CHO), in conjunction with a vector such as the major intermediate early gene promoter element from human cytomegalovirus is an effective expression system for antibodies (Foecking et al., Gene 45:101 (1986); Cockett et al., Bio/Technology 8:2 (1990)).

[0811] In bacterial systems, a number of expression vectors may be advantageously selected depending upon the use intended for the antibody molecule being expressed. For example, when a large quantity of such a protein is to be produced, for the generation of pharmaceutical compositions of an antibody molecule, vectors which direct the expression of high levels of fusion protein products that are readily purified may be desirable. Such vectors include, but are not limited, to the E. coli expression vector pUR278 (Ruther et al., EMBO J. 2:1791 (1983)), in which the antibody coding sequence may be ligated individually into the vector in frame with the lac Z coding region so that a fusion protein is produced; pIN vectors (Inouye & Inouye, Nucleic Acids Res. 13:3101-3109 (1985); Van Heeke & Schuster, J. Biol. Chem. 24:5503-5509 (1989)); and the like. pGEX vectors may also be used to express foreign polypeptides as fusion proteins with glutathione S-transferase (GST). In general, such fusion proteins are soluble and can easily be purified from lysed cells by adsorption and binding to matrix glutathione-agarose beads followed by elution in the presence of free glutathione. The pGEX vectors are designed to include thrombin or factor Xa protease cleavage sites so that the cloned target gene product can be released from the GST moiety.

[0812] In an insect system, Autographa californica nuclear polyhedrosis virus (AcNPV) is used as a vector to express foreign genes. The virus grows in Spodoptera frugiperda cells. The antibody coding sequence may be cloned individually into non-essential regions (for example the polyhedrin gene) of the virus and placed under control of an AcNPV promoter (for example the polyhedrin promoter).

[0813] In mammalian host cells, a number of viral-based expression systems may be utilized. In cases where an adenovirus is used as an expression vector, the antibody coding sequence of interest may be ligated to an adenovirus transcription/translation control complex, e.g., the late promoter and tripartite leader sequence. This chimeric gene may then be inserted in the adenovirus genome by in vitro or in vivo recombination. Insertion in a non-essential region of the viral genome (e.g., region E1 or E3) will result in a recombinant virus that is viable and capable of expressing the antibody molecule in infected hosts. (e.g., see Logan & Shenk, Proc. Natl. Acad. Sci. USA 81:355-359 (1984)). Specific initiation signals may also be required for efficient translation of inserted antibody coding sequences. These signals include the ATG initiation codon and adjacent sequences. Furthermore, the initiation codon must be in phase with the reading frame of the desired coding sequence to ensure translation of the entire insert. These exogenous translational control signals and initiation codons can be of a variety of origins, both natural and synthetic. The efficiency of expression may be enhanced by the inclusion of appropriate transcription enhancer elements, transcription terminators, etc. (see Bittner et al., Methods in Enzymol. 153:51-544 (1987)).

[0814] In addition, a host cell strain may be chosen which modulates the expression of the inserted sequences, or modifies and processes the gene product in the specific fashion desired. Such modifications (e.g., glycosylation) and processing (e.g., cleavage) of protein products may be important for the function of the protein. Different host cells have characteristic and specific mechanisms for the post-translational processing and modification of proteins and gene products. Appropriate cell lines or host systems can be chosen to ensure the correct modification and processing of the foreign protein expressed. To this end, eukaryotic host cells which possess the cellular machinery for proper processing of the primary transcript, glycosylation, and phosphorylation of the gene product may be used. Such mammalian host cells include but are not limited to CHO, VERY, BHK, Hela, COS, MDCK, 293, 3T3, WI38, and in particular, breast cancer cell lines such as, for example, BT483, Hs578T, HTB2, BT20 and T47D, and normal mammary gland cell line such as, for example, CRL7030 and Hs578Bst.

[0815] For long-term, high-yield production of recombinant proteins, stable expression is preferred. For example, cell lines which stably express the antibody molecule may be engineered. Rather than using expression vectors which contain viral origins of replication, host cells can be transformed with DNA controlled by appropriate expression control elements (e.g., promoter, enhancer, sequences, transcription terminators, polyadenylation sites, etc.), and a selectable marker. Following the introduction of the foreign DNA, engineered cells may be allowed to grow for 1-2 days in an enriched media, and then are switched to a selective media. The selectable marker in the recombinant plasmid confers resistance to the selection and allows cells to stably integrate the plasmid into their chromosomes and grow to form foci which in turn can be cloned and expanded into cell lines. This method may advantageously be used to engineer cell lines which express the antibody molecule. Such engineered cell lines may be particularly useful in screening and evaluation of compounds that interact directly or indirectly with the antibody molecule.

[0816] A number of selection systems may be used, including but not limited to the herpes simplex virus thymidine kinase (Wigler et al., Cell 11:223 (1977)), hypoxanthine-guanine phosphoribosyltransferase (Szybalska & Szybalski, Proc. Natl. Acad. Sci. USA 48:202 (1992)), and adenine phosphoribosyltransferase (Lowy et al., Cell 22:817 (1980)) genes can be employed in tk-, hgprt- or aprt-cells, respectively. Also, antimetabolite resistance can be used as the basis of selection for the following genes: dhfr, which confers resistance to methotrexate (Wigler et al., Natl. Acad. Sci. USA 77:357 (1980); O'Hare et al., Proc. Natl. Acad. Sci. USA 78:1527 (1981)); gpt, which confers resistance to mycophenolic acid (Mulligan & Berg, Proc. Natl. Acad. Sci. USA 78:2072 (1981)); neo, which confers resistance to the aminoglycoside G-418 Clinical Pharmacy 12:488-505; Wu and Wu, Biotherapy 3:87-95 (1991); Tolstoshev, Ann. Rev. Pharmacol. Toxicol. 32:573-596 (1993); Mulligan, Science 260:926-932 (1993); and Morgan and Anderson, Ann. Rev. Biochem. 62:191-217 (1993); May, 1993, TIB TECH 11(5):155-215); and hygro, which confers resistance to hygromycin (Santerre et al., Gene 30:147 (1984)). Methods commonly known in the art of recombinant DNA technology may be routinely applied to select the desired recombinant clone, and such methods are described, for example, in Ausubel et al. (eds.), Current Protocols in Molecular Biology, John Wiley & Sons, NY (1993); Kriegler, Gene Transfer and Expression, A Laboratory Manual, Stockton Press, NY (1990); and in Chapters 12 and 13, Dracopoli et al. (eds), Current Protocols in Human Genetics, John Wiley & Sons, NY (1994); Colberre-Garapin et al., J. Mol. Biol. 150:1 (1981), which are incorporated by reference herein in their entireties.

[0817] The expression levels of an antibody molecule can be increased by vector amplification (for a review, see Bebbington and Hentschel, The use of vectors based on gene amplification for the expression of cloned genes in mammalian cells in DNA cloning, Vol.3. (Academic Press, New York, 1987)). When a marker in the vector system expressing antibody is amplifiable, increase in the level of inhibitor present in culture of host cell will increase the number of copies of the marker gene. Since the amplified region is associated with the antibody gene, production of the antibody will also increase (Crouse et al., Mol. Cell. Biol. 3:257 (1983)).

[0818] The host cell may be co-transfected with two expression vectors of the invention, the first vector encoding a heavy chain derived polypeptide and the second vector encoding a light chain derived polypeptide. The two vectors may contain identical selectable markers which enable equal expression of heavy and light chain polypeptides. Alternatively, a single vector may be used which encodes, and is capable of expressing, both heavy and light chain polypeptides. In such situations, the light chain should be placed before the heavy chain to avoid an excess of toxic free heavy chain (Proudfoot, Nature 322:52 (1986); Kohler, Proc. Natl. Acad. Sci. USA 77:2197 (1980)). The coding sequences for the heavy and light chains may comprise cDNA or genomic DNA.

[0819] Once an antibody molecule of the invention has been produced by an animal, chemically synthesized, or recombinantly expressed, it may be purified by any method known in the art for purification of an immunoglobulin molecule, for example, by chromatography (e.g., ion exchange, affinity, particularly by affinity for the specific antigen after Protein A, and sizing column chromatography), centrifugation, differential solubility, or by any other standard technique for the purification of proteins. In addition, the antibodies of the present invention or fragments thereof can be fused to heterologous polypeptide sequences described herein or otherwise known in the art, to facilitate purification.

[0820] The present invention encompasses antibodies recombinantly fused or chemically conjugated (including both covalently and non-covalently conjugations) to a polypeptide (or portion thereof, preferably at least 10, 20, 30, 40, 50, 60, 70, 80, 90 or 100 amino acids of the polypeptide) of the present invention to generate fusion proteins. The fusion does not necessarily need to be direct, but may occur through linker sequences. The antibodies may be specific for antigens other than polypeptides (or portion thereof, preferably at least 10, 20, 30, 40, 50, 60, 70, 80, 90 or 100 amino acids of the polypeptide) of the present invention. For example, antibodies may be used to target the polypeptides of the present invention to particular cell types, either in vitro or in vivo, by fusing or conjugating the polypeptides of the present invention to antibodies specific for particular cell surface receptors. Antibodies fused or conjugated to the polypeptides of the present invention may also be used in in vitro immunoassays and purification methods using methods known in the art. See e.g., Harbor et al., supra, and PCT publication WO 93/21232; EP 439,095; Naramura et al., Immunol. Lett. 39:91-99 (1994); U.S. Pat. No. 5,474,981; Gillies et al., PNAS 89:1428-1432 (1992); Fell et al., J. Immunol. 146:2446-2452(1991), which are incorporated by reference in their entireties.

[0821] The present invention further includes compositions comprising the polypeptides of the present invention fused or conjugated to antibody domains other than the variable regions. For example, the polypeptides of the present invention may be fused or conjugated to an antibody Fc region, or portion thereof. The antibody portion fused to a polypeptide of the present invention may comprise the constant region, hinge region, CH1 domain, CH2 domain, and CH3 domain or any combination of whole domains or portions thereof. The polypeptides may also be fused or conjugated to the above antibody portions to form multimers. For example, Fc portions fused to the polypeptides of the present invention can form dimers through disulfide bonding between the Fc portions. Higher multimeric forms can be made by fusing the polypeptides to portions of IgA and IgM. Methods for fusing or conjugating the polypeptides of the present invention to antibody portions are known in the art. See, e.g., U.S. Pat. Nos. 5,336,603; 5,622,929; 5,359,046; 5,349,053; 5,447,851; 5,112,946; EP 307,434; EP 367,166; PCT publications WO 96/04388; WO 91/06570; Ashkenazi et al., Proc. Natl. Acad. Sci. USA 88:10535-10539 (1991); Zheng et al., J. Immunol. 154:5590-5600 (1995); and Vil et al., Proc. Natl. Acad. Sci. USA 89:11337-11341(1992) (said references incorporated by reference in their entireties).

[0822] As discussed, supra, the polypeptides corresponding to a polypeptide, polypeptide fragment, or a variant of SEQ ID NO:2, SEQ ID NO:4, SEQ ID NO:6, SEQ ID NO:8, SEQ ID NO:10, SEQ ID NO:12, SEQ ID NO:14, SEQ ID NO:16, SEQ ID NO:18, and/or SEQ ID NO:20 may be fused or conjugated to the above antibody portions to increase the in vivo half life of the polypeptides or for use in immunoassays using methods known in the art. Further, the polypeptides corresponding to SEQ ID NO:2, SEQ ID NO:4, SEQ ID NO:6, SEQ ID NO:8, SEQ ID NO:10, SEQ ID NO:12, SEQ ID NO:14, SEQ ID NO:16, SEQ ID NO:18, and/or SEQ ID NO:20 may be fused or conjugated to the above antibody portions to facilitate purification. One reported example describes chimeric proteins consisting of the first two domains of the human CD4-polypeptide and various domains of the constant regions of the heavy or light chains of mammalian immunoglobulins. (EP 394,827; Traunecker et al., Nature 331:84-86 (1988). The polypeptides of the present invention fused or conjugated to an antibody having disulfide-linked dimeric structures (due to the IgG) may also be more efficient in binding and neutralizing other molecules, than the monomeric secreted protein or protein fragment alone. (Fountoulakis et al., J. Biochem. 270:3958-3964 (1995)). In many cases, the Fc part in a fusion protein is beneficial in therapy and diagnosis, and thus can result in, for example, improved pharmacokinetic properties. (EP A 232,262). Alternatively, deleting the Fc part after the fusion protein has been expressed, detected, and purified, would be desired. For example, the Fc portion may hinder therapy and diagnosis if the fusion protein is used as an antigen for immunizations. In drug discovery, for example, human proteins, such as hIL-5, have been fused with Fc portions for the purpose of high-throughput screening assays to identify antagonists of hIL-5. (See, Bennett et al., J. Molecular Recognition 8:52-58 (1995); Johanson et al., J. Biol. Chem. 270:9459-9471 (1995).

[0823] Moreover, the antibodies or fragments thereof of the present invention can be fused to marker sequences, such as a peptide to facilitate purification. In preferred embodiments, the marker amino acid sequence is a hexa-histidine peptide, such as the tag provided in a pQE vector (QIAGEN, Inc., 9259 Eton Avenue, Chatsworth, Calif., 91311), among others, many of which are commercially available. As described in Gentz et al., Proc. Natl. Acad. Sci. USA 86:821-824 (1989), for instance, hexa-histidine provides for convenient purification of the fusion protein. Other peptide tags useful for purification include, but are not limited to, the “HA” tag, which corresponds to an epitope derived from the influenza hemagglutinin protein (Wilson et al., Cell 37:767 (1984)) and the “flag” tag.

[0824] The present invention further encompasses antibodies or fragments thereof conjugated to a diagnostic or therapeutic agent. The antibodies can be used diagnostically to, for example, monitor the development or progression of a tumor as part of a clinical testing procedure to, e.g., determine the efficacy of a given treatment regimen. Detection can be facilitated by coupling the antibody to a detectable substance. Examples of detectable substances include various enzymes, prosthetic groups, fluorescent materials, luminescent materials, bioluminescent materials, radioactive materials, positron emitting metals using various positron emission tomographies, and nonradioactive paramagnetic metal ions. The detectable substance may be coupled or conjugated either directly to the antibody (or fragment thereof) or indirectly, through an intermediate (such as, for example, a linker known in the art) using techniques known in the art. See, for example, U.S. Pat. No. 4,741,900 for metal ions which can be conjugated to antibodies for use as diagnostics according to the present invention. Examples of suitable enzymes include horseradish peroxidase, alkaline phosphatase, beta-galactosidase, or acetylcholinesterase; examples of suitable prosthetic group complexes include streptavidin/biotin and avidin/biotin; examples of suitable fluorescent materials include umbelliferone, fluorescein, fluorescein isothiocyanate, rhodamine, dichlorotriazinylamine fluorescein, dansyl chloride or phycoerythrin; an example of a luminescent material includes luminol; examples of bioluminescent materials include luciferase, luciferin, and aequorin; and examples of suitable radioactive material include 125I, 131I, 111In or 99Tc.

[0825] Further, an antibody or fragment thereof may be conjugated to a therapeutic moiety such as a cytotoxin, e.g., a cytostatic or cytocidal agent, a therapeutic agent or a radioactive metal ion, e.g., alpha-emitters such as, for example, 213Bi. A cytotoxin or cytotoxic agent includes any agent that is detrimental to cells. Examples include paclitaxol, cytochalasin B, gramicidin D, ethidium bromide, emetine, mitomycin, etoposide, tenoposide, vincristine, vinblastine, colchicin, doxorubicin, daunorubicin, dihydroxy anthracin dione, mitoxantrone, mithramycin, actinomycin D, 1-dehydrotestosterone, glucocorticoids, procaine, tetracaine, lidocaine, propranolol, and puromycin and analogs or homologues thereof. Therapeutic agents include, but are not limited to, antimetabolites (e.g., methotrexate, 6-mercaptopurine, 6-thioguanine, cytarabine, 5-fluorouracil decarbazine), alkylating agents (e.g., mechlorethamine, thioepa chlorambucil, melphalan, carmustine (BSNU) and lomustine (CCNU), cyclothosphamide, busulfan, dibromomannitol, streptozotocin, mitomycin C, and cis-dichlorodiamine platinum (II) (DDP) cisplatin), anthracyclines (e.g., daunorubicin (formerly daunomycin) and doxorubicin), antibiotics (e.g., dactinomycin (formerly actinomycin), bleomycin, mithramycin, and anthramycin (AMC)), and anti-mitotic agents (e.g., vincristine and vinblastine).

[0826] The conjugates of the invention can be used for modifying a given biological response, the therapeutic agent or drug moiety is not to be construed as limited to classical chemical therapeutic agents. For example, the drug moiety may be a protein or polypeptide possessing a desired biological activity. Such proteins may include, for example, a toxin such as abrin, ricin A, pseudomonas exotoxin, or diphtheria toxin; a protein such as tumor necrosis factor, α-interferon, β-interferon, nerve growth factor, platelet derived growth factor, tissue plasminogen activator, an apoptotic agent, e.g., TNF-alpha, TNF-beta, AIM I (See, International Publication No. WO 97/33899), AIM II (See, International Publication No. WO 97/34911), Fas Ligand (Takahashi et al., Int. Immunol., 6:1567-1574 (1994)), VEGI (See, International Publication No. WO 99/23105), a thrombotic agent or an anti-angiogenic agent, e.g., angiostatin or endostatin; or, biological response modifiers such as, for example, lymphokines, interleukin-1 (“IL-1”), interleukin-2 (“IL-2”), interleukin-6 (“IL-6”), granulocyte macrophage colony stimulating factor (“GM-CSF”), granulocyte colony stimulating factor (“G-CSF”), or other growth factors.

[0827] Antibodies may also be attached to solid supports, which are particularly useful for immunoassays or purification of the target antigen. Such solid supports include, but are not limited to, glass, cellulose, polyacrylamide, nylon, polystyrene, polyvinyl chloride or polypropylene.

[0828] Techniques for conjugating such therapeutic moiety to antibodies are well known, see, e.g., Arnon et al., “Monoclonal Antibodies For Immunotargeting Of Drugs In Cancer Therapy”, in Monoclonal Antibodies And Cancer Therapy, Reisfeld et al. (eds.), pp. 243-56 (Alan R. Liss, Inc. 1985); Hellstrom et al., “Antibodies For Drug Delivery”, in Controlled Drug Delivery (2nd Ed.), Robinson et al. (eds.), pp. 623-53 (Marcel Dekker, Inc. 1987); Thorpe, “Antibody Carriers Of Cytotoxic Agents In Cancer Therapy: A Review”, in Monoclonal Antibodies '84: Biological And Clinical Applications, Pinchera et al. (eds.), pp. 475-506 (1985); “Analysis, Results, And Future Prospective Of The Therapeutic Use Of Radiolabeled Antibody In Cancer Therapy”, in Monoclonal Antibodies For Cancer Detection And Therapy, Baldwin et al. (eds.), pp. 303-16 (Academic Press 1985), and Thorpe et al., “The Preparation And Cytotoxic Properties Of Antibody-Toxin Conjugates”, Immunol. Rev. 62:119-58 (1982).

[0829] Alternatively, an antibody can be conjugated to a second antibody to form an antibody heteroconjugate as described by Segal in U.S. Pat. No. 4,676,980, which is incorporated herein by reference in its entirety.

[0830] An antibody, with or without a therapeutic moiety conjugated to it, administered alone or in combination with cytotoxic factor(s) and/or cytokine(s) can be used as a therapeutic.

[0831] The present invention also encompasses the creation of synthetic antibodies directed against the polypeptides of the present invention. One example of synthetic antibodies is described in Radrizzani, M., et al., Medicina, (Aires), 59(6):753-8, (1999)). Recently, a new class of synthetic antibodies has been described and are referred to as molecularly imprinted polymers (MIPs) (Semorex, Inc.). Antibodies, peptides, and enzymes are often used as molecular recognition elements in chemical and biological sensors. However, their lack of stability and signal transduction mechanisms limits their use as sensing devices. Molecularly imprinted polymers (MIPs) are capable of mimicking the function of biological receptors but with less stability constraints. Such polymers provide high sensitivity and selectivity while maintaining excellent thermal and mechanical stability. MIPs have the ability to bind to small molecules and to target molecules such as organics and proteins' with equal or greater potency than that of natural antibodies. These “super” MIPs have higher affinities for their target and thus require lower concentrations for efficacious binding.

[0832] During synthesis, the MIPs are imprinted so as to have complementary size, shape, charge and functional groups of the selected target by using the target molecule itself (such as a polypeptide, antibody, etc.), or a substance having a very similar structure, as its “print” or “template.” MIPs can be derivatized with the same reagents afforded to antibodies. For example, fluorescent ‘super’ MIPs can be coated onto beads or wells for use in highly sensitive separations or assays, or for use in high throughput screening of proteins.

[0833] Moreover, MIPs based upon the structure of the polypeptide(s) of the present invention may be useful in screening for compounds that bind to the polypeptide(s) of the invention. Such a MIP would serve the role of a synthetic “receptor” by minimicking the native architecture of the polypeptide. In fact, the ability of a MIP to serve the role of a synthetic receptor has already been demonstrated for the estrogen receptor (Ye, L., Yu, Y., Mosbach, K, Analyst., 126(6):760-5, (2001); Dickert, F, L., Hayden, O., Halikias, K, P, Analyst., 126(6):766-71, (2001)). A synthetic receptor may either be mimicked in its entirety (e.g., as the entire protein), or mimicked as a series of short peptides corresponding to the protein (Rachkov, A., Minoura, N, Biochim, Biophys, Acta., 1544(1-2):255-66, (2001)). Such a synthetic receptor MIPs may be employed in any one or more of the screening methods described elsewhere herein.

[0834] MIPs have also been shown to be useful in “sensing” the presence of its mimicked molecule (Cheng, Z., Wang, E., Yang, X, Biosens, Bioelectron., 16(3):179-85, (2001); Jenkins, A, L., Yin, R., Jensen, J. L, Analyst., 126(6):798-802, (2001); Jenkins, A, L., Yin, R., Jensen, J. L, Analyst., 126(6):798-802, (2001)). For example, a MIP designed using a polypeptide of the present invention may be used in assays designed to identify, and potentially quantitate, the level of said polypeptide in a sample. Such a MIP may be used as a substitute for any component described in the assays, or kits, provided herein (e.g., ELISA, etc.).

[0835] A number of methods may be employed to create MIPs to a specific receptor, ligand, polypeptide, peptide, organic molecule. Several preferred methods are described by Esteban et al in J. Anal, Chem., 370(7):795-802, (2001), which is hereby incorporated herein by reference in its entirety in addition to any references cited therein. Additional methods are known in the art and are encompassed by the present invention, such as for example, Hart, B, R., Shea, K, J. J. Am. Chem, Soc., 123(9):2072-3, (2001); and Quaglia, M., Chenon, K., Hall, A, J., De, Lorenzi, E., Sellergren, B, J. Am. Chem, Soc., 123(10):2146-54, (2001); which are hereby incorporated by reference in their entirety herein.

[0836] Uses for Antibodies Directed Against Polypeptides of the Invention

[0837] The antibodies of the present invention have various utilities. For example, such antibodies may be used in diagnostic assays to detect the presence or quantification of the polypeptides of the invention in a sample. Such a diagnostic assay may be comprised of at least two steps. The first, subjecting a sample with the antibody, wherein the sample is a tissue (e.g., human, animal, etc.), biological fluid (e.g., blood, urine, sputum, semen, amniotic fluid, saliva, etc.), biological extract (e.g., tissue or cellular homogenate, etc.), a protein microchip (e.g., See Arenkov P, et al., Anal Biochem., 278(2):123-131 (2000)), or a chromatography column, etc. And a second step involving the quantification of antibody bound to the substrate. Alternatively, the method may additionally involve a first step of attaching the antibody, either covalently, electrostatically, or reversibly, to a solid support, and a second step of subjecting the bound antibody to the sample, as defined above and elsewhere herein.

[0838] Various diagnostic assay techniques are known in the art, such as competitive binding assays, direct or indirect sandwich assays and immunoprecipitation assays conducted in either heterogeneous or homogenous phases (Zola, Monoclonal Antibodies: A Manual of Techniques, CRC Press, Inc., (1987), pp147-158). The antibodies used in the diagnostic assays can be labeled with a detectable moiety. The detectable moiety should be capable of producing, either directly or indirectly, a detectable signal. For example, the detectable moiety may be a radioisotope, such as 2H, 14C, 32P, or 125I, a florescent or chemiluminescent compound, such as fluorescein isothiocyanate, rhodamine, or luciferin, or an enzyme, such as alkaline phosphatase, beta-galactosidase, green fluorescent protein, or horseradish peroxidase. Any method known in the art for conjugating the antibody to the detectable moiety may be employed, including those methods described by Hunter et al., Nature, 144:945 (1962); Dafvid et al., Biochem., 13:1014 (1974); Pain et al., J. Immunol. Metho., 40:219(1981); and Nygren, J. Histochem. And Cytochem., 30:407 (1982).

[0839] Antibodies directed against the polypeptides of the present invention are useful for the affinity purification of such polypeptides from recombinant cell culture or natural sources. In this process, the antibodies against a particular polypeptide are immobilized on a suitable support, such as a Sephadex resin or filter paper, using methods well known in the art. The immobilized antibody then is contacted with a sample containing the polypeptides to be purified, and thereafter the support is washed with a suitable solvent that will remove substantially all the material in the sample except for the desired polypeptides, which are bound to the immobilized antibody. Finally, the support is washed with another suitable solvent that will release the desired polypeptide from the antibody.

[0840] Immunophenotyping

[0841] The antibodies of the invention may be utilized for immunophenotyping of cell lines and biological samples. The translation product of the gene of the present invention may be useful as a cell specific marker, or more specifically as a cellular marker that is differentially expressed at various stages of differentiation and/or maturation of particular cell types. Monoclonal antibodies directed against a specific epitope, or combination of epitopes, will allow for the screening of cellular populations expressing the marker. Various techniques can be utilized using monoclonal antibodies to screen for cellular populations expressing the marker(s), and include magnetic separation using antibody-coated magnetic beads, “panning” with antibody attached to a solid matrix (i.e., plate), and flow cytometry (See, e.g., U.S. Pat. No. 5,985,660; and Morrison et al., Cell, 96:737-49 (1999)).

[0842] These techniques allow for the screening of particular populations of cells, such as might be found with hematological malignancies (i.e. minimal residual disease (MRD) in acute leukemic patients) and “non-self” cells in transplantations to prevent Graft-versus-Host Disease (GVHD). Alternatively, these techniques allow for the screening of hematopoietic stem and progenitor cells capable of undergoing proliferation and/or differentiation, as might be found in human umbilical cord blood.

[0843] Assays for Antibody Binding

[0844] The antibodies of the invention may be assayed for immunospecific binding by any method known in the art. The immunoassays which can be used include but are not limited to competitive and non-competitive assay systems using techniques such as western blots, radioimmunoassays, ELISA (enzyme linked immunosorbent assay), “sandwich” immunoassays, immunoprecipitation assays, precipitin reactions, gel diffusion precipitin reactions, immunodiffusion assays, agglutination assays, complement-fixation assays, immunoradiometric assays, fluorescent immunoassays, protein A immunoassays, to name but a few. Such assays are routine and well known in the art (see, e.g., Ausubel et al, eds, 1994, Current Protocols in Molecular Biology, Vol. 1, John Wiley & Sons, Inc., New York, which is incorporated by reference herein in its entirety). Exemplary immunoassays are described briefly below (but are not intended by way of limitation).

[0845] Immunoprecipitation protocols generally comprise lysing a population of cells in a lysis buffer such as RIPA buffer (1% NP-40 or Triton X-100, 1% sodium deoxycholate, 0.1% SDS, 0.15 M NaCl, 0.01 M sodium phosphate at pH 7.2, 1% Trasylol) supplemented with protein phosphatase and/or protease inhibitors (e.g., EDTA, PMSF, aprotinin, sodium vanadate), adding the antibody of interest to the cell lysate, incubating for a period of time (e.g., 1-4 hours) at 4° C., adding protein A and/or protein G sepharose beads to the cell lysate, incubating for about an hour or more at 4° C., washing the beads in lysis buffer and resuspending the beads in SDS/sample buffer. The ability of the antibody of interest to immunoprecipitate a particular antigen can be assessed by, e.g., western blot analysis. One of skill in the art would be knowledgeable as to the parameters that can be modified to increase the binding of the antibody to an antigen and decrease the background (e.g., pre-clearing the cell lysate with sepharose beads). For further discussion regarding immunoprecipitation protocols see, e.g., Ausubel et al, eds, 1994, Current Protocols in Molecular Biology, Vol. 1, John Wiley & Sons, Inc., New York at 10.16.1.

[0846] Western blot analysis generally comprises preparing protein samples, electrophoresis of the protein samples in a polyacrylamide gel (e.g., 8%-20% SDS-PAGE depending on the molecular weight of the antigen), transferring the protein sample from the polyacrylamide gel to a membrane such as nitrocellulose, PVDF or nylon, blocking the membrane in blocking solution (e.g., PBS with 3% BSA or non-fat milk), washing the membrane in washing buffer (e.g., PBS-Tween 20), blocking the membrane with primary antibody (the antibody of interest) diluted in blocking buffer, washing the membrane in washing buffer, blocking the membrane with a secondary antibody (which recognizes the primary antibody, e.g., an anti-human antibody) conjugated to an enzymatic substrate (e.g., horseradish peroxidase or alkaline phosphatase) or radioactive molecule (e.g., 32P or 125I) diluted in blocking buffer, washing the membrane in wash buffer, and detecting the presence of the antigen. One of skill in the art would be knowledgeable as to the parameters that can be modified to increase the signal detected and to reduce the background noise. For further discussion regarding western blot protocols see, e.g., Ausubel et al, eds, 1994, Current Protocols in Molecular Biology, Vol. 1, John Wiley & Sons, Inc., New York at 10.8.1.

[0847] ELISAs comprise preparing antigen, coating the well of a 96 well microtiter plate with the antigen, adding the antibody of interest conjugated to a detectable compound such as an enzymatic substrate (e.g., horseradish peroxidase or alkaline phosphatase) to the well and incubating for a period of time, and detecting the presence of the antigen. In ELISAs the antibody of interest does not have to be conjugated to a detectable compound; instead, a second antibody (which recognizes the antibody of interest) conjugated to a detectable compound may be added to the well. Further, instead of coating the well with the antigen, the antibody may be coated to the well. In this case, a second antibody conjugated to a detectable compound may be added following the addition of the antigen of interest to the coated well. One of skill in the art would be knowledgeable as to the parameters that can be modified to increase the signal detected as well as other variations of ELISAs known in the art. For further discussion regarding ELISAs see, e.g., Ausubel et al, eds, 1994, Current Protocols in Molecular Biology, Vol. 1, John Wiley & Sons, Inc., New York at 11.2.1.

[0848] The binding affinity of an antibody to an antigen and the off-rate of an antibody-antigen interaction can be determined by competitive binding assays. One example of a competitive binding assay is a radioimmunoassay comprising the incubation of labeled antigen (e.g., 3H or 125I) with the antibody of interest in the presence of increasing amounts of unlabeled antigen, and the detection of the antibody bound to the labeled antigen. The affinity of the antibody of interest for a particular antigen and the binding off-rates can be determined from the data by scatchard plot analysis. Competition with a second antibody can also be determined using radioimmunoassays. In this case, the antigen is incubated with antibody of interest conjugated to a labeled compound (e.g., 3H or 125I) in the presence of increasing amounts of an unlabeled second antibody.

[0849] Therapeutic Uses of Antibodies

[0850] The present invention is further directed to antibody-based therapies which involve administering antibodies of the invention to an animal, preferably a mammal, and most preferably a human, patient for treating one or more of the disclosed diseases, disorders, or conditions. Therapeutic compounds of the invention include, but are not limited to, antibodies of the invention (including fragments, analogs and derivatives thereof as described herein) and nucleic acids encoding antibodies of the invention (including fragments, analogs and derivatives thereof and anti-idiotypic antibodies as described herein). The antibodies of the invention can be used to treat, inhibit or prevent diseases, disorders or conditions associated with aberrant expression and/or activity of a polypeptide of the invention, including, but not limited to, any one or more of the diseases, disorders, or conditions described herein. The treatment and/or prevention of diseases, disorders, or conditions associated with aberrant expression and/or activity of a polypeptide of the invention includes, but is not limited to, alleviating symptoms associated with those diseases, disorders or conditions. Antibodies of the invention may be provided in pharmaceutically acceptable compositions as known in the art or as described herein.

[0851] A summary of the ways in which the antibodies of the present invention may be used therapeutically includes binding polynucleotides or polypeptides of the present invention locally or systemically in the body or by direct cytotoxicity of the antibody, e.g. as mediated by complement (CDC) or by effector cells (ADCC). Some of these approaches are described in more detail below. Armed with the teachings provided herein, one of ordinary skill in the art will know how to use the antibodies of the present invention for diagnostic, monitoring or therapeutic purposes without undue experimentation.

[0852] The antibodies of this invention may be advantageously utilized in combination with other monoclonal or chimeric antibodies, or with lymphokines or hematopoietic growth factors (such as, e.g., IL-2, IL-3 and IL-7), for example, which serve to increase the number or activity of effector cells which interact with the antibodies.

[0853] The antibodies of the invention may be administered alone or in combination with other types of treatments (e.g., radiation therapy, chemotherapy, hormonal therapy, immunotherapy and anti-tumor agents). Generally, administration of products of a species origin or species reactivity (in the case of antibodies) that is the same species as that of the patient is preferred. Thus, in a preferred embodiment, human antibodies, fragments derivatives, analogs, or nucleic acids, are administered to a human patient for therapy or prophylaxis.

[0854] It is preferred to use high affinity and/or potent in vivo inhibiting and/or neutralizing antibodies against polypeptides or polynucleotides of the present invention, fragments or regions thereof, for both immunoassays directed to and therapy of disorders related to polynucleotides or polypeptides, including fragments thereof, of the present invention. Such antibodies, fragments, or regions, will preferably have an affinity for polynucleotides or polypeptides of the invention, including fragments thereof. Preferred binding affinities include those with a dissociation constant or Kd less than 5×10-2 M, 10-2 M, 5×10-3 M, 10-3 M, 5×10-4 M, 10-4 M, 5×10-5 M, 10-5 M, 5×10-6 M, 10-6 M, 5×10-7 M, 10-7 M, 5×10-8 M, 10-8 M, 5×10-9 M, 10-9 M, 5×10-10 M, 10-10 M, 5×10-11 M, 10-11 M, 5×10-12 M, 10-12 M, 5×10-13 M, 10-13 M, 5×10-14 M, 10-14 M, 5×10-15 M, and 10-15 M.

[0855] Antibodies directed against polypeptides of the present invention are useful for inhibiting allergic reactions in animals. For example, by administering a therapeutically acceptable dose of an antibody, or antibodies, of the present invention, or a cocktail of the present antibodies, or in combination with other antibodies of varying sources, the animal may not elicit an allergic response to antigens.

[0856] Likewise, one could envision cloning the gene encoding an antibody directed against a polypeptide of the present invention, said polypeptide having the potential to elicit an allergic and/or immune response in an organism, and transforming the organism with said antibody gene such that it is expressed (e.g., constitutively, inducibly, etc.) in the organism. Thus, the organism would effectively become resistant to an allergic response resulting from the ingestion or presence of such an immune/allergic reactive polypeptide. Moreover, such a use of the antibodies of the present invention may have particular utility in preventing and/or ameliorating autoimmune diseases and/or disorders, as such conditions are typically a result of antibodies being directed against endogenous proteins. For example, in the instance where the polypeptide of the present invention is responsible for modulating the immune response to auto-antigens, transforming the organism and/or individual with a construct comprising any of the promoters disclosed herein or otherwise known in the art, in addition, to a polynucleotide encoding the antibody directed against the polypeptide of the present invention could effective inhibit the organisms immune system from eliciting an immune response to the auto-antigen(s). Detailed descriptions of therapeutic and/or gene therapy applications of the present invention are provided elsewhere herein.

[0857] Alternatively, antibodies of the present invention could be produced in a plant (e.g., cloning the gene of the antibody directed against a polypeptide of the present invention, and transforming a plant with a suitable vector comprising said gene for constitutive expression of the antibody within the plant), and the plant subsequently ingested by an animal, thereby conferring temporary immunity to the animal for the specific antigen the antibody is directed towards (See, for example, U.S. Pat. Nos. 5,914,123 and 6,034,298).

[0858] In another embodiment, antibodies of the present invention, preferably polyclonal antibodies, more preferably monoclonal antibodies, and most preferably single-chain antibodies, can be used as a means of inhibiting gene expression of a particular gene, or genes, in a human, mammal, and/or other organism. See, for example, International Publication Number WO 00/05391, published Feb. 3, 2000, to Dow Agrosciences LLC. The application of such methods for the antibodies of the present invention are known in the art, and are more particularly described elsewhere herein.

[0859] In yet another embodiment, antibodies of the present invention may be useful for multimerizing the polypeptides of the present invention. For example, certain proteins may confer enhanced biological activity when present in a multimeric state (i.e., such enhanced activity may be due to the increased effective concentration of such proteins whereby more protein is available in a localized location).

[0860] Antibody-Based Gene Therapy

[0861] In a specific embodiment, nucleic acids comprising sequences encoding antibodies or functional derivatives thereof, are administered to treat, inhibit or prevent a disease or disorder associated with aberrant expression and/or activity of a polypeptide of the invention, by way of gene therapy. Gene therapy refers to therapy performed by the administration to a subject of an expressed or expressible nucleic acid. In this embodiment of the invention, the nucleic acids produce their encoded protein that mediates a therapeutic effect.

[0862] Any of the methods for gene therapy available in the art can be used according to the present invention. Exemplary methods are described below.

[0863] For general reviews of the methods of gene therapy, see Goldspiel et al., Clinical Pharmacy 12:488-505 (1993); Wu and Wu, Biotherapy 3:87-95 (1991); Tolstoshev, Ann. Rev. Pharmacol. Toxicol. 32:573-596 (1993); Mulligan, Science 5 260:926-932 (1993); and Morgan and Anderson, Ann. Rev. Biochem. 62:191-217 (1993); May, TIBTECH 11(5):155-215 (1993). Methods commonly known in the art of recombinant DNA technology which can be used are described in Ausubel et al. (eds.), Current Protocols in Molecular Biology, John Wiley & Sons, NY (1993); and Kriegler, Gene Transfer and Expression, A Laboratory Manual, Stockton Press, NY (1990).

[0864] In a preferred aspect, the compound comprises nucleic acid sequences encoding an antibody, said nucleic acid sequences being part of expression vectors that express the antibody or fragments or chimeric proteins or heavy or light chains thereof in a suitable host. In particular, such nucleic acid sequences have promoters operably linked to the antibody coding region, said promoter being inducible or constitutive, and, optionally, tissue-specific. In another particular embodiment, nucleic acid molecules are used in which the antibody coding sequences and any other desired sequences are flanked by regions that promote homologous recombination at a desired site in the genome, thus providing for intrachromosomal expression of the antibody encoding nucleic acids (Koller and Smithies, Proc. Natl. Acad. Sci. USA 86:8932-8935 (1989); Zijlstra et al., Nature 342:435-438 (1989). In specific embodiments, the expressed antibody molecule is a single chain antibody; alternatively, the nucleic acid sequences include sequences encoding both the heavy and light chains, or fragments thereof, of the antibody.

[0865] Delivery of the nucleic acids into a patient may be either direct, in which case the patient is directly exposed to the nucleic acid or nucleic acid-carrying vectors, or indirect, in which case, cells are first transformed with the nucleic acids in vitro, then transplanted into the patient. These two approaches are known, respectively, as in vivo or ex vivo gene therapy.

[0866] In a specific embodiment, the nucleic acid sequences are directly administered in vivo, where it is expressed to produce the encoded product. This can be accomplished by any of numerous methods known in the art, e.g., by constructing them as part of an appropriate nucleic acid expression vector and administering it so that they become intracellular, e.g., by infection using defective or attenuated retrovirals or other viral vectors (see U.S. Pat. No. 4,980,286), or by direct injection of naked DNA, or by use of microparticle bombardment (e.g., a gene gun; Biolistic, Dupont), or coating with lipids or cell-surface receptors or transfecting agents, encapsulation in liposomes, microparticles, or microcapsules, or by administering them in linkage to a peptide which is known to enter the nucleus, by administering it in linkage to a ligand subject to receptor-mediated endocytosis (see, e.g., Wu and Wu, J. Biol. Chem. 262:4429-4432 (1987)) (which can be used to target cell types specifically expressing the receptors), etc. In another embodiment, nucleic acid-ligand complexes can be formed in which the ligand comprises a fusogenic viral peptide to disrupt endosomes, allowing the nucleic acid to avoid lysosomal degradation. In yet another embodiment, the nucleic acid can be targeted in vivo for cell specific uptake and expression, by targeting a specific receptor (see, e.g., PCT Publications WO 92/06180; WO 92/22635; WO92/20316; WO93/14188, WO 93/20221). Alternatively, the nucleic acid can be introduced intracellularly and incorporated within host cell DNA for expression, by homologous recombination (Koller and Smithies, Proc. Natl. Acad. Sci. USA 86:8932-8935 (1989); Zijlstra et al., Nature 342:435-438 (1989)).

[0867] In a specific embodiment, viral vectors that contains nucleic acid sequences encoding an antibody of the invention are used. For example, a retroviral vector can be used (see Miller et al., Meth. Enzymol. 217:581-599 (1993)). These retroviral vectors contain the components necessary for the correct packaging of the viral genome and integration into the host cell DNA. The nucleic acid sequences encoding the antibody to be used in gene therapy are cloned into one or more vectors, which facilitates delivery of the gene into a patient. More detail about retroviral vectors can be found in Boesen et al., Biotherapy 6:291-302 (1994), which describes the use of a retroviral vector to deliver the mdr1 gene to hematopoietic stem cells in order to make the stem cells more resistant to chemotherapy. Other references illustrating the use of retroviral vectors in gene therapy are: Clowes et al., J. Clin. Invest. 93:644-651 (1994); Kiem et al., Blood 83:1467-1473 (1994); Salmons and Gunzberg, Human Gene Therapy 4:129-141 (1993); and Grossman and Wilson, Curr. Opin. in Genetics and Devel. 3:110-114 (1993).

[0868] Adenoviruses are other viral vectors that can be used in gene therapy. Adenoviruses are especially attractive vehicles for delivering genes to respiratory epithelia. Adenoviruses naturally infect respiratory epithelia where they cause a mild disease. Other targets for adenovirus-based delivery systems are liver, the central nervous system, endothelial cells, and muscle. Adenoviruses have the advantage of being capable of infecting non-dividing cells. Kozarsky and Wilson, Current Opinion in Genetics and Development 3:499-503 (1993) present a review of adenovirus-based gene therapy. Bout et al., Human Gene Therapy 5:3-10 (1994) demonstrated the use of adenovirus vectors to transfer genes to the respiratory epithelia of rhesus monkeys. Other instances of the use of adenoviruses in gene therapy can be found in Rosenfeld et al., Science 252:431-434 (1991); Rosenfeld et al., Cell 68:143-155 (1992); Mastrangeli et al., J. Clin. Invest. 91:225-234 (1993); PCT Publication WO94/12649; and Wang, et al., Gene Therapy 2:775-783 (1995). In a preferred embodiment, adenovirus vectors are used.

[0869] Adeno-associated virus (AAV) has also been proposed for use in gene therapy (Walsh et al., Proc. Soc. Exp. Biol. Med. 204:289-300 (1993); U.S. Pat. No. 5,436,146).

[0870] Another approach to gene therapy involves transferring a gene to cells in tissue culture by such methods as electroporation, lipofection, calcium phosphate mediated transfection, or viral infection. Usually, the method of transfer includes the transfer of a selectable marker to the cells. The cells are then placed under selection to isolate those cells that have taken up and are expressing the transferred gene. Those cells are then delivered to a patient.

[0871] In this embodiment, the nucleic acid is introduced into a cell prior to administration in vivo of the resulting recombinant cell. Such introduction can be carried out by any method known in the art, including but not limited to transfection, electroporation, microinjection, infection with a viral or bacteriophage vector containing the nucleic acid sequences, cell fusion, chromosome-mediated gene transfer, microcell-mediated gene transfer, spheroplast fusion, etc. Numerous techniques are known in the art for the introduction of foreign genes into cells (see, e.g., Loeffler and Behr, Meth. Enzymol. 217:599-618 (1993); Cohen et al., Meth. Enzymol. 217:618-644 (1993); Cline, Pharmac. Ther. 29:69-92m (1985) and may be used in accordance with the present invention, provided that the necessary developmental and physiological functions of the recipient cells are not disrupted. The technique should provide for the stable transfer of the nucleic acid to the cell, so that the nucleic acid is expressible by the cell and preferably heritable and expressible by its cell progeny.

[0872] The resulting recombinant cells can be delivered to a patient by various methods known in the art. Recombinant blood cells (e.g., hematopoietic stem or progenitor cells) are preferably administered intravenously. The amount of cells envisioned for use depends on the desired effect, patient state, etc., and can be determined by one skilled in the art.

[0873] Cells into which a nucleic acid can be introduced for purposes of gene therapy encompass any desired, available cell type, and include but are not limited to epithelial cells, endothelial cells, keratinocytes, fibroblasts, muscle cells, hepatocytes; blood cells such as Tlymphocytes, Blymphocytes, monocytes, macrophages, neutrophils, eosinophils, megakaryocytes, granulocytes; various stem or progenitor cells, in particular hematopoietic stem or progenitor cells, e.g., as obtained from bone marrow, umbilical cord blood, peripheral blood, fetal liver, etc.

[0874] In a preferred embodiment, the cell used for gene therapy is autologous to the patient.

[0875] In an embodiment in which recombinant cells are used in gene therapy, nucleic acid sequences encoding an antibody are introduced into the cells such that they are expressible by the cells or their progeny, and the recombinant cells are then administered in vivo for therapeutic effect. In a specific embodiment, stem or progenitor cells are used. Any stem and/or progenitor cells which can be isolated and maintained in vitro can potentially be used in accordance with this embodiment of the present invention (see e.g. PCT Publication WO 94/08598; Stemple and Anderson, Cell 71:973-985 (1992); Rheinwald, Meth. Cell Bio. 21A:229 (1980); and Pittelkow and Scott, Mayo Clinic Proc. 61:771 (1986)).

[0876] In a specific embodiment, the nucleic acid to be introduced for purposes of gene therapy comprises an inducible promoter operably linked to the coding region, such that expression of the nucleic acid is controllable by controlling the presence or absence of the appropriate inducer of transcription. Demonstration of Therapeutic or Prophylactic Activity

[0877] The compounds or pharmaceutical compositions of the invention are preferably tested in vitro, and then in vivo for the desired therapeutic or prophylactic activity, prior to use in humans. For example, in vitro assays to demonstrate the therapeutic or prophylactic utility of a compound or pharmaceutical composition include, the effect of a compound on a cell line or a patient tissue sample. The effect of the compound or composition on the cell line and/or tissue sample can be determined utilizing techniques known to those of skill in the art including, but not limited to, rosette formation assays and cell lysis assays. In accordance with the invention, in vitro assays which can be used to determine whether administration of a specific compound is indicated, include in vitro cell culture assays in which a patient tissue sample is grown in culture, and exposed to or otherwise administered a compound, and the effect of such compound upon the tissue sample is observed.

[0878] Therapeutic/Prophylactic Administration and Compositions

[0879] The invention provides methods of treatment, inhibition and prophylaxis by administration to a subject of an effective amount of a compound or pharmaceutical composition of the invention, preferably an antibody of the invention. In a preferred aspect, the compound is substantially purified (e.g., substantially free from substances that limit its effect or produce undesired side-effects). The subject is preferably an animal, including but not limited to animals such as cows, pigs, horses, chickens, cats, dogs, etc., and is preferably a mammal, and most preferably human.

[0880] Formulations and methods of administration that can be employed when the compound comprises a nucleic acid or an immunoglobulin are described above; additional appropriate formulations and routes of administration can be selected from among those described herein below.

[0881] Various delivery systems are known and can be used to administer a compound of the invention, e.g., encapsulation in liposomes, microparticles, microcapsules, recombinant cells capable of expressing the compound, receptor-mediated endocytosis (see, e.g., Wu and Wu, J. Biol. Chem. 262:4429-4432 (1987)), construction of a nucleic acid as part of a retroviral or other vector, etc. Methods of introduction include but are not limited to intradermal, intramuscular, intraperitoneal, intravenous, subcutaneous, intranasal, epidural, and oral routes. The compounds or compositions may be administered by any convenient route, for example by infusion or bolus injection, by absorption through epithelial or mucocutaneous linings (e.g., oral mucosa, rectal and intestinal mucosa, etc.) and may be administered together with other biologically active agents. Administration can be systemic or local. In addition, it may be desirable to introduce the pharmaceutical compounds or compositions of the invention into the central nervous system by any suitable route, including intraventricular and intrathecal injection; intraventricular injection may be facilitated by an intraventricular catheter, for example, attached to a reservoir, such as an Ommaya reservoir. Pulmonary administration can also be employed, e.g., by use of an inhaler or nebulizer, and formulation with an aerosolizing agent.

[0882] In a specific embodiment, it may be desirable to administer the pharmaceutical compounds or compositions of the invention locally to the area in need of treatment; this may be achieved by, for example, and not by way of limitation, local infusion during surgery, topical application, e.g., in conjunction with a wound dressing after surgery, by injection, by means of a catheter, by means of a suppository, or by means of an implant, said implant being of a porous, non-porous, or gelatinous material, including membranes, such as sialastic membranes, or fibers. Preferably, when administering a protein, including an antibody, of the invention, care must be taken to use materials to which the protein does not absorb.

[0883] In another embodiment, the compound or composition can be delivered in a vesicle, in particular a liposome (see Langer, Science 249:1527-1533 (1990); Treat et al., in Liposomes in the Therapy of Infectious Disease and Cancer, Lopez-Berestein and Fidler (eds.), Liss, New York, pp. 353-365 (1989); Lopez-Berestein, ibid., pp. 317-327; see generally ibid.)

[0884] In yet another embodiment, the compound or composition can be delivered in a controlled release system. In one embodiment, a pump may be used (see Langer, supra; Sefton, CRC Crit. Ref. Biomed. Eng. 14:201 (1987); Buchwald et al., Surgery 88:507 (1980); Saudek et al., N. Engl. J. Med. 321:574 (1989)). In another embodiment, polymeric materials can be used (see Medical Applications of Controlled Release, Langer and Wise (eds.), CRC Pres., Boca Raton, Fla. (1974); Controlled Drug Bioavailability, Drug Product Design and Performance, Smolen and Ball (eds.), Wiley, New York (1984); Ranger and Peppas, J., Macromol. Sci. Rev. Macromol. Chem. 23:61 (1983); see also Levy et al., Science 228:190 (1985); During et al., Ann. Neurol. 25:351 (1989); Howard et al., J. Neurosurg. 71:105 (1989)). In yet another embodiment, a controlled release system can be placed in proximity of the therapeutic target, i.e., the brain, thus requiring only a fraction of the systemic dose (see, e.g., Goodson, in Medical Applications of Controlled Release, supra, vol. 2, pp. 115-138 (1984)).

[0885] Other controlled release systems are discussed in the review by Langer (Science 249:1527-1533 (1990)).

[0886] In a specific embodiment where the compound of the invention is a nucleic acid encoding a protein, the nucleic acid can be administered in vivo to promote expression of its encoded protein, by constructing it as part of an appropriate nucleic acid expression vector and administering it so that it becomes intracellular, e.g., by use of a retroviral vector (see U.S. Pat. No. 4,980,286), or by direct injection, or by use of microparticle bombardment (e.g., a gene gun; Biolistic, Dupont), or coating with lipids or cell-surface receptors or transfecting agents, or by administering it in linkage to a homeobox-like peptide which is known to enter the nucleus (see e.g., Joliot et al., Proc. Natl. Acad. Sci. USA 88:1864-1868 (1991)), etc. Alternatively, a nucleic acid can be introduced intracellularly and incorporated within host cell DNA for expression, by homologous recombination.

[0887] The present invention also provides pharmaceutical compositions. Such compositions comprise a therapeutically effective amount of a compound, and a pharmaceutically acceptable carrier. In a specific embodiment, the term “pharmaceutically acceptable” means approved by a regulatory agency of the Federal or a state government or listed in the U.S. Pharmacopeia or other generally recognized pharmacopeia for use in animals, and more particularly in humans. The term “carrier” refers to a diluent, adjuvant, excipient, or vehicle with which the therapeutic is administered. Such pharmaceutical carriers can be sterile liquids, such as water and oils, including those of petroleum, animal, vegetable or synthetic origin, such as peanut oil, soybean oil, mineral oil, sesame oil and the like. Water is a preferred carrier when the pharmaceutical composition is administered intravenously. Saline solutions and aqueous dextrose and glycerol solutions can also be employed as liquid carriers, particularly for injectable solutions. Suitable pharmaceutical excipients include starch, glucose, lactose, sucrose, gelatin, malt, rice, flour, chalk, silica gel, sodium stearate, glycerol monostearate, talc, sodium chloride, dried skim milk, glycerol, propylene, glycol, water, ethanol and the like. The composition, if desired, can also contain minor amounts of wetting or emulsifying agents, or pH buffering agents. These compositions can take the form of solutions, suspensions, emulsion, tablets, pills, capsules, powders, sustained-release formulations and the like. The composition can be formulated as a suppository, with traditional binders and carriers such as triglycerides. Oral formulation can include standard carriers such as pharmaceutical grades of mannitol, lactose, starch, magnesium stearate, sodium saccharine, cellulose, magnesium carbonate, etc. Examples of suitable pharmaceutical carriers are described in “Remington's Pharmaceutical Sciences” by E. W. Martin. Such compositions will contain a therapeutically effective amount of the compound, preferably in purified form, together with a suitable amount of carrier so as to provide the form for proper administration to the patient. The formulation should suit the mode of administration.

[0888] In a preferred embodiment, the composition is formulated in accordance with routine procedures as a pharmaceutical composition adapted for intravenous administration to human beings. Typically, compositions for intravenous administration are solutions in sterile isotonic aqueous buffer. Where necessary, the composition may also include a solubilizing agent and a local anesthetic such as lignocaine to ease pain at the site of the injection. Generally, the ingredients are supplied either separately or mixed together in unit dosage form, for example, as a dry lyophilized powder or water free concentrate in a hermetically sealed container such as an ampoule or sachette indicating the quantity of active agent. Where the composition is to be administered by infusion, it can be dispensed with an infusion bottle containing sterile pharmaceutical grade water or saline. Where the composition is administered by injection, an ampoule of sterile water for injection or saline can be provided so that the ingredients may be mixed prior to administration.

[0889] The compounds of the invention can be formulated as neutral or salt forms. Pharmaceutically acceptable salts include those formed with anions such as those derived from hydrochloric, phosphoric, acetic, oxalic, tartaric acids, etc., and those formed with cations such as those derived from sodium, potassium, ammonium, calcium, ferric hydroxides, isopropylamine, triethylamine, 2-ethylamino ethanol, histidine, procaine, etc.

[0890] The amount of the compound of the invention which will be effective in the treatment, inhibition and prevention of a disease or disorder associated with aberrant expression and/or activity of a polypeptide of the invention can be determined by standard clinical techniques. In addition, in vitro assays may optionally be employed to help identify optimal dosage ranges. The precise dose to be employed in the formulation will also depend on the route of administration, and the seriousness of the disease or disorder, and should be decided according to the judgment of the practitioner and each patient's circumstances. Effective doses may be extrapolated from dose-response curves derived from in vitro or animal model test systems.

[0891] For antibodies, the dosage administered to a patient is typically 0.1 mg/kg to 100 mg/kg of the patient's body weight. Preferably, the dosage administered to a patient is between 0.1 mg/kg and 20 mg/kg of the patient's body weight, more preferably 1 mg/kg to 10 mg/kg of the patient's body weight. Generally, human antibodies have a longer half-life within the human body than antibodies from other species due to the immune response to the foreign polypeptides. Thus, lower dosages of human antibodies and less frequent administration is often possible. Further, the dosage and frequency of administration of antibodies of the invention may be reduced by enhancing uptake and tissue penetration (e.g., into the brain) of the antibodies by modifications such as, for example, lipidation.

[0892] The invention also provides a pharmaceutical pack or kit comprising one or more containers filled with one or more of the ingredients of the pharmaceutical compositions of the invention. Optionally associated with such container(s) can be a notice in the form prescribed by a governmental agency regulating the manufacture, use or sale of pharmaceuticals or biological products, which notice reflects approval by the agency of manufacture, use or sale for human administration.

[0893] Diagnosis and Imaging with Antibodies

[0894] Labeled antibodies, and derivatives and analogs thereof, which specifically bind to a polypeptide of interest can be used for diagnostic purposes to detect, diagnose, or monitor diseases, disorders, and/or conditions associated with the aberrant expression and/or activity of a polypeptide of the invention. The invention provides for the detection of aberrant expression of a polypeptide of interest, comprising (a) assaying the expression of the polypeptide of interest in cells or body fluid of an individual using one or more antibodies specific to the polypeptide interest and (b) comparing the level of gene expression with a standard gene expression level, whereby an increase or decrease in the assayed polypeptide gene expression level compared to the standard expression level is indicative of aberrant expression.

[0895] The invention provides a diagnostic assay for diagnosing a disorder, comprising (a) assaying the expression of the polypeptide of interest in cells or body fluid of an individual using one or more antibodies specific to the polypeptide interest and (b) comparing the level of gene expression with a standard gene expression level, whereby an increase or decrease in the assayed polypeptide gene expression level compared to the standard expression level is indicative of a particular disorder. With respect to cancer, the presence of a relatively high amount of transcript in biopsied tissue from an individual may indicate a predisposition for the development of the disease, or may provide a means for detecting the disease prior to the appearance of actual clinical symptoms. A more definitive diagnosis of this type may allow health professionals to employ preventative measures or aggressive treatment earlier thereby preventing the development or further progression of the cancer.

[0896] Antibodies of the invention can be used to assay protein levels in a biological sample using classical immunohistological methods known to those of skill in the art (e.g., see Jalkanen, et al., J. Cell. Biol. 101:976-985 (1985); Jalkanen, et al., J. Cell. Biol. 105:3087-3096 (1987)). Other antibody-based methods useful for detecting protein gene expression include immunoassays, such as the enzyme linked immunosorbent assay (ELISA) and the radioimmunoassay (RIA). Suitable antibody assay labels are known in the art and include enzyme labels, such as, glucose oxidase; radioisotopes, such as iodine (125I, 121I), carbon (14C), sulfur (35S), tritium (3H), indium (112In), and technetium (99Tc); luminescent labels, such as luminol; and fluorescent labels, such as fluorescein and rhodamine, and biotin.

[0897] One aspect of the invention is the detection and diagnosis of a disease or disorder associated with aberrant expression of a polypeptide of interest in an animal, preferably a mammal and most preferably a human. In one embodiment, diagnosis comprises: a) administering (for example, parenterally, subcutaneously, or intraperitoneally) to a subject an effective amount of a labeled molecule which specifically binds to the polypeptide of interest; b) waiting for a time interval following the administering for permitting the labeled molecule to preferentially concentrate at sites in the subject where the polypeptide is expressed (and for unbound labeled molecule to be cleared to background level); c) determining background level; and d) detecting the labeled molecule in the subject, such that detection of labeled molecule above the background level indicates that the subject has a particular disease or disorder associated with aberrant expression of the polypeptide of interest. Background level can be determined by various methods including, comparing the amount of labeled molecule detected to a standard value previously determined for a particular system.

[0898] It will be understood in the art that the size of the subject and the imaging system used will determine the quantity of imaging moiety needed to produce diagnostic images. In the case of a radioisotope moiety, for a human subject, the quantity of radioactivity injected will normally range from about 5 to 20 millicuries of 99mTc. The labeled antibody or antibody fragment will then preferentially accumulate at the location of cells which contain the specific protein. In vivo tumor imaging is described in S. W. Burchiel et al., “Immunopharmacokinetics of Radiolabeled Antibodies and Their Fragments.” (Chapter 13 in Tumor Imaging: The Radiochemical Detection of Cancer, S. W. Burchiel and B. A. Rhodes, eds., Masson Publishing Inc. (1982).

[0899] Depending on several variables, including the type of label used and the mode of administration, the time interval following the administration for permitting the labeled molecule to preferentially concentrate at sites in the subject and for unbound labeled molecule to be cleared to background level is 6 to 48 hours or 6 to 24 hours or 6 to 12 hours. In another embodiment the time interval following administration is 5 to 20 days or 5 to 10 days.

[0900] In an embodiment, monitoring of the disease or disorder is carried out by repeating the method for diagnosing the disease or disease, for example, one month after initial diagnosis, six months after initial diagnosis, one year after initial diagnosis, etc.

[0901] Presence of the labeled molecule can be detected in the patient using methods known in the art for in vivo scanning. These methods depend upon the type of label used. Skilled artisans will be able to determine the appropriate method for detecting a particular label. Methods and devices that may be used in the diagnostic methods of the invention include, but are not limited to, computed tomography (CT), whole body scan such as position emission tomography (PET), magnetic resonance imaging (MRI), and sonography.

[0902] In a specific embodiment, the molecule is labeled with a radioisotope and is detected in the patient using a radiation responsive surgical instrument (Thurston et al., U.S. Pat. No. 5,441,050). In another embodiment, the molecule is labeled with a fluorescent compound and is detected in the patient using a fluorescence responsive scanning instrument. In another embodiment, the molecule is labeled with a positron emitting metal and is detected in the patent using positron emission-tomography. In yet another embodiment, the molecule is labeled with a paramagnetic label and is detected in a patient using magnetic resonance imaging (MRI).

[0903] Kits

[0904] The present invention provides kits that can be used in the above methods. In one embodiment, a kit comprises an antibody of the invention, preferably a purified antibody, in one or more containers. In a specific embodiment, the kits of the present invention contain a substantially isolated polypeptide comprising an epitope which is specifically immunoreactive with an antibody included in the kit. Preferably, the kits of the present invention further comprise a control antibody which does not react with the polypeptide of interest. In another specific embodiment, the kits of the present invention contain a means for detecting the binding of an antibody to a polypeptide of interest (e.g., the antibody may be conjugated to a detectable substrate such as a fluorescent compound, an enzymatic substrate, a radioactive compound or a luminescent compound, or a second antibody which recognizes the first antibody may be conjugated to a detectable substrate).

[0905] In another specific embodiment of the present invention, the kit is a diagnostic kit for use in screening serum containing antibodies specific against proliferative and/or cancerous polynucleotides and polypeptides. Such a kit may include a control antibody that does not react with the polypeptide of interest. Such a kit may include a substantially isolated polypeptide antigen comprising an epitope which is specifically immunoreactive with at least one anti-polypeptide antigen antibody. Further, such a kit includes means for detecting the binding of said antibody to the antigen (e.g., the antibody may be conjugated to a fluorescent compound such as fluorescein or rhodamine which can be detected by flow cytometry). In specific embodiments, the kit may include a recombinantly produced or chemically synthesized polypeptide antigen. The polypeptide antigen of the kit may also be attached to a solid support.

[0906] In a more specific embodiment the detecting means of the above-described kit includes a solid support to which said polypeptide antigen is attached. Such a kit may also include a non-attached reporter-labeled anti-human antibody. In this embodiment, binding of the antibody to the polypeptide antigen can be detected by binding of the said reporter-labeled antibody.

[0907] In an additional embodiment, the invention includes a diagnostic kit for use in screening serum containing antigens of the polypeptide of the invention. The diagnostic kit includes a substantially isolated antibody specifically immunoreactive with polypeptide or polynucleotide antigens, and means for detecting the binding of the polynucleotide or polypeptide antigen to the antibody. In one embodiment, the antibody is attached to a solid support. In a specific embodiment, the antibody may be a monoclonal antibody. The detecting means of the kit may include a second, labeled monoclonal antibody. Alternatively, or in addition, the detecting means may include a labeled, competing antigen.

[0908] In one diagnostic configuration, test serum is reacted with a solid phase reagent having a surface-bound antigen obtained by the methods of the present invention. After binding with specific antigen antibody to the reagent and removing unbound serum components by washing, the reagent is reacted with reporter-labeled anti-human antibody to bind reporter to the reagent in proportion to the amount of bound anti-antigen antibody on the solid support. The reagent is again washed to remove unbound labeled antibody, and the amount of reporter associated with the reagent is determined. Typically, the reporter is an enzyme which is detected by incubating the solid phase in the presence of a suitable fluorometric, luminescent or colorimetric substrate (Sigma, St. Louis, Mo.).

[0909] The solid surface reagent in the above assay is prepared by known techniques for attaching protein material to solid support material, such as polymeric beads, dip sticks, 96-well plate or filter material. These attachment methods generally include non-specific adsorption of the protein to the support or covalent attachment of the protein, typically through a free amine group, to a chemically reactive group on the solid support, such as an activated carboxyl, hydroxyl, or aldehyde group. Alternatively, streptavidin coated plates can be used in conjunction with biotinylated antigen(s).

[0910] Thus, the invention provides an assay system or kit for carrying out this diagnostic method. The kit generally includes a support with surface-bound recombinant antigens, and a reporter-labeled anti-human antibody for detecting surface-bound anti-antigen antibody.

[0911] Fusion Proteins

[0912] Any polypeptide of the present invention can be used to generate fusion proteins. For example, the polypeptide of the present invention, when fused to a second protein, can be used as an antigenic tag. Antibodies raised against the polypeptide of the present invention can be used to indirectly detect the second protein by binding to the polypeptide. Moreover, because certain proteins target cellular locations based on trafficking signals, the polypeptides of the present invention can be used as targeting molecules once fused to other proteins.

[0913] Examples of domains that can be fused to polypeptides of the present invention include not only heterologous signal sequences, but also other heterologous functional regions. The fusion does not necessarily need to be direct, but may occur through linker sequences.

[0914] Moreover, fusion proteins may also be engineered to improve characteristics of the polypeptide of the present invention. For instance, a region of additional amino acids, particularly charged amino acids, may be added to the N-terminus of the polypeptide to improve stability and persistence during purification from the host cell or subsequent handling and storage. Peptide moieties may be added to the polypeptide to facilitate purification. Such regions may be removed prior to final preparation of the polypeptide. Similarly, peptide cleavage sites can be introduced in-between such peptide moieties, which could additionally be subjected to protease activity to remove said peptide(s) from the protein of the present invention. The addition of peptide moieties, including peptide cleavage sites, to facilitate handling of polypeptides are familiar and routine techniques in the art.

[0915] Moreover, polypeptides of the present invention, including fragments, and specifically epitopes, can be combined with parts of the constant domain of immunoglobulins (IgA, IgE, IgG, IgM) or portions thereof (CH1, CH2, CH3, and any combination thereof, including both entire domains and portions thereof), resulting in chimeric polypeptides. These fusion proteins facilitate purification and show an increased half-life in vivo. One reported example describes chimeric proteins consisting of the first two domains of the human CD4-polypeptide and various domains of the constant regions of the heavy or light chains of mammalian immunoglobulins. (EP A 394,827; Traunecker et al., Nature 331:84-86 (1988).) Fusion proteins having disulfide-linked dimeric structures (due to the IgG) can also be more efficient in binding and neutralizing other molecules, than the monomeric secreted protein or protein fragment alone. (Fountoulakis et al., J. Biochem. 270:3958-3964 (1995).)

[0916] Similarly, EP-A-O 464 533 (Canadian counterpart 2045869) discloses fusion proteins comprising various portions of the constant region of immunoglobulin molecules together with another human protein or part thereof. In many cases, the Fc part in a fusion protein is beneficial in therapy and diagnosis, and thus can result in, for example, improved pharmacokinetic properties. (EP-A 0232 262.) Alternatively, deleting the Fc part after the fusion protein has been expressed, detected, and purified, would be desired. For example, the Fc portion may hinder therapy and diagnosis if the fusion protein is used as an antigen for immunizations. In drug discovery, for example, human proteins, such as hIL-5, have been fused with Fc portions for the purpose of high-throughput screening assays to identify antagonists of hIL-5. (See, D. Bennett et al., J. Molecular Recognition 8:52-58 (1995); K. Johanson et al., J. Biol. Chem. 270:9459-9471 (1995).)

[0917] Moreover, the polypeptides of the present invention can be fused to marker sequences (also referred to as “tags”). Due to the availability of antibodies specific to such “tags”, purification of the fused polypeptide of the invention, and/or its identification is significantly facilitated since antibodies specific to the polypeptides of the invention are not required. Such purification may be in the form of an affinity purification whereby an anti-tag antibody or another type of affinity matrix (e.g., anti-tag antibody attached to the matrix of a flow-thru column) that binds to the epitope tag is present. In preferred embodiments, the marker amino acid sequence is a hexa-histidine peptide, such as the tag provided in a pQE vector (QIAGEN, Inc., 9259 Eton Avenue, Chatsworth, Calif., 91311), among others, many of which are commercially available. As described in Gentz et al., Proc. Natl. Acad. Sci. USA 86:821-824 (1989), for instance, hexa-histidine provides for convenient purification of the fusion protein. Another peptide tag useful for purification, the “HA” tag, corresponds to an epitope derived from the influenza hemagglutinin protein. (Wilson et al., Cell 37:767 (1984)).

[0918] The skilled artisan would acknowledge the existence of other “tags” which could be readily substituted for the tags referred to supra for purification and/or identification of polypeptides of the present invention (Jones C., et al., J Chromatogr A. 707(1):3-22 (1995)). For example, the c-myc tag and the 8F9, 3C7, 6E10, G4m B7 and 9E10 antibodies thereto (Evan et al., Molecular and Cellular Biology 5:3610-3616 (1985)); the Herpes Simplex virus glycoprotein D (gD) tag and its antibody (Paborsky et al., Protein Engineering, 3(6):547-553 (1990), the Flag-peptide—i.e., the octapeptide sequence DYKDDDDK (SEQ ID NO:464), (Hopp et al., Biotech. 6:1204-1210 (1988); the KT3 epitope peptide (Martin et al., Science, 255:192-194 (1992)); a-tubulin epitope peptide (Skinner et al., J. Biol. Chem., 266:15136-15166, (1991)); the T7 gene 10 protein peptide tag (Lutz-Freyermuth et al., Proc. Natl. Sci. USA, 87:6363-6397 (1990)), the FITC epitope (Zymed, Inc.), the GFP epitope (Zymed, Inc.), and the Rhodamine epitope (Zymed, Inc.).

[0919] The present invention also encompasses the attachment of up to nine codons encoding a repeating series of up to nine arginine amino acids to the coding region of a polynucleotide of the present invention. The invention also encompasses chemically derivitizing a polypeptide of the present invention with a repeating series of up to nine arginine amino acids. Such a tag, when attached to a polypeptide, has recently been shown to serve as a universal pass, allowing compounds access to the interior of cells without additional derivitization or manipulation (Wender, P., et al., unpublished data).

[0920] Protein fusions involving polypeptides of the present invention, including fragments and/or variants thereof, can be used for the following, non-limiting examples, subcellular localization of proteins, determination of protein-protein interactions via immunoprecipitation, purification of proteins via affinity chromatography, functional and/or structural characterization of protein. The present invention also encompasses the application of hapten specific antibodies for any of the uses referenced above for epitope fusion proteins. For example, the polypeptides of the present invention could be chemically derivatized to attach hapten molecules (e.g., DNP, (Zymed, Inc.)). Due to the availability of monoclonal antibodies specific to such haptens, the protein could be readily purified using immunoprecipation, for example.

[0921] Polypeptides of the present invention, including fragments and/or variants thereof, in addition to, antibodies directed against such polypeptides, fragments, and/or variants, may be fused to any of a number of known, and yet to be determined, toxins, such as ricin, saporin (Mashiba H, et al., Ann. N. Y. Acad. Sci. 1999;886:233-5), or HC toxin (Tonukari NJ, et al., Plant Cell. 2000 February; 12(2):237-248), for example. Such fusions could be used to deliver the toxins to desired tissues for which a ligand or a protein capable of binding to the polypeptides of the invention exists.

[0922] The invention encompasses the fusion of antibodies directed against polypeptides of the present invention, including variants and fragments thereof, to said toxins for delivering the toxin to specific locations in a cell, to specific tissues, and/or to specific species. Such bifunctional antibodies are known in the art, though a review describing additional advantageous fusions, including citations for methods of production, can be found in P. J. Hudson, Curr. Opp. In. Imm. 11:548-557, (1999); this publication, in addition to the references cited therein, are hereby incorporated by reference in their entirety herein. In this context, the term “toxin” may be expanded to include any heterologous protein, a small molecule, radionucleotides, cytotoxic drugs, liposomes, adhesion molecules, glycoproteins, ligands, cell or tissue-specific ligands, enzymes, of bioactive agents, biological response modifiers, anti-fungal agents, hormones, steroids, vitamins, peptides, peptide analogs, anti-allergenic agents, anti-tubercular agents, anti-viral agents, antibiotics, anti-protozoan agents, chelates, radioactive particles, radioactive ions, X-ray contrast agents, monoclonal antibodies, polyclonal antibodies and genetic material. In view of the present disclosure, one skilled in the art could determine whether any particular “toxin” could be used in the compounds of the present invention. Examples of suitable “toxins” listed above are exemplary only and are not intended to limit the “toxins” that may be used in the present invention.

[0923] Thus, any of these above fusions can be engineered using the polynucleotides or the polypeptides of the present invention.

[0924] Vectors, Host Cells, and Protein Production

[0925] The present invention also relates to vectors containing the polynucleotide of the present invention, host cells, and the production of polypeptides by recombinant techniques. The vector may be, for example, a phage, plasmid, viral, or retroviral vector. Retroviral vectors may be replication competent or replication defective. In the latter case, viral propagation generally will occur only in complementing host cells.

[0926] The polynucleotides may be joined to a vector containing a selectable marker for propagation in a host. Generally, a plasmid vector is introduced in a precipitate, such as a calcium phosphate precipitate, or in a complex with a charged lipid. If the vector is a virus, it may be packaged in vitro using an appropriate packaging cell line and then transduced into host cells.

[0927] The polynucleotide insert should be operatively linked to an appropriate promoter, such as the phage lambda PL promoter, the E. coli lac, trp, phoA and tac promoters, the SV40 early and late promoters and promoters of retroviral LTRs, to name a few. Other suitable promoters will be known to the skilled artisan. The expression constructs will further contain sites for transcription initiation, termination, and, in the transcribed region, a ribosome binding site for translation. The coding portion of the transcripts expressed by the constructs will preferably include a translation initiating codon at the beginning and a termination codon (UAA, UGA or UAG) appropriately positioned at the end of the polypeptide to be translated.

[0928] As indicated, the expression vectors will preferably include at least one selectable marker. Such markers include dihydrofolate reductase, G418 or neomycin resistance for eukaryotic cell culture and tetracycline, kanamycin or ampicillin resistance genes for culturing in E. coli and other bacteria. Representative examples of appropriate hosts include, but are not limited to, bacterial cells, such as E. coli, Streptomyces and Salmonella typhimurium cells; fungal cells, such as yeast cells (e.g., Saccharomyces cerevisiae or Pichia pastoris (ATCC Accession No. 201178)); insect cells such as Drosophila S2 and Spodoptera Sf9 cells; animal cells such as CHO, COS, 293, and Bowes melanoma cells; and plant cells. Appropriate culture mediums and conditions for the above-described host cells are known in the art.

[0929] Among vectors preferred for use in bacteria include pQE70, pQE60 and pQE-9, available from QIAGEN, Inc.; pBluescript vectors, Phagescript vectors, pNH8A, pNH16a, pNH18A, pNH46A, available from Stratagene Cloning Systems, Inc.; and ptrc99a, pKK223-3, pKK233-3, pDR540, pRIT5 available from Pharmacia Biotech, Inc. Among preferred eukaryotic vectors are pWLNEO, pSV2CAT, pOG44, pXT1 and pSG available from Stratagene; and pSVK3, pBPV, pMSG and pSVL available from Pharmacia. Preferred expression vectors for use in yeast systems include, but are not limited to pYES2, pYD1, pTEF1/Zeo, pYES2/GS, pPICZ, pGAPZ, pGAPZalph, pPIC9, pPIC3.5, pHIL-D2, pHIL-S1, pPIC3.5K, pPIC9K, and PAO815 (all available from Invitrogen, Carlsbad, Calif.). Other suitable vectors will be readily apparent to the skilled artisan.

[0930] Introduction of the construct into the host cell can be effected by calcium phosphate transfection, DEAE-dextran mediated transfection, cationic lipid-mediated transfection, electroporation, transduction, infection, or other methods. Such methods are described in many standard laboratory manuals, such as Davis et al., Basic Methods In Molecular Biology (1986). It is specifically contemplated that the polypeptides of the present invention may in fact be expressed by a host cell lacking a recombinant vector.

[0931] A polypeptide of this invention can be recovered and purified from recombinant cell cultures by well-known methods including ammonium sulfate or ethanol precipitation, acid extraction, anion or cation exchange chromatography, phosphocellulose chromatography, hydrophobic interaction chromatography, affinity chromatography, hydroxylapatite chromatography and lectin chromatography. Most preferably, high performance liquid chromatography (“HPLC”) is employed for purification.

[0932] Polypeptides of the present invention, and preferably the secreted form, can also be recovered from: products purified from natural sources, including bodily fluids, tissues and cells, whether directly isolated or cultured; products of chemical synthetic procedures; and products produced by recombinant techniques from a prokaryotic or eukaryotic host, including, for example, bacterial, yeast, higher plant, insect, and mammalian cells. Depending upon the host employed in a recombinant production procedure, the polypeptides of the present invention may be glycosylated or may be non-glycosylated. In addition, polypeptides of the invention may also include an initial modified methionine residue, in some cases as a result of host-mediated processes. Thus, it is well known in the art that the N-terminal methionine encoded by the translation initiation codon generally is removed with high efficiency from any protein after translation in all eukaryotic cells. While the N-terminal methionine on most proteins also is efficiently removed in most prokaryotes, for some proteins, this prokaryotic removal process is inefficient, depending on the nature of the amino acid to which the N-terminal methionine is covalently linked.

[0933] In one embodiment, the yeast Pichia pastoris is used to express the polypeptide of the present invention in a eukaryotic system. Pichia pastoris is a methylotrophic yeast which can metabolize methanol as its sole carbon source. A main step in the methanol metabolization pathway is the oxidation of methanol to formaldehyde using O2. This reaction is catalyzed by the enzyme alcohol oxidase. In order to metabolize methanol as its sole carbon source, Pichia pastoris must generate high levels of alcohol oxidase due, in part, to the relatively low affinity of alcohol oxidase for O2. Consequently, in a growth medium depending on methanol as a main carbon source, the promoter region of one of the two alcohol oxidase genes (AOX 1) is highly active. In the presence of methanol, alcohol oxidase produced from the AOX1 gene comprises up to approximately 30% of the total soluble protein in Pichia pastoris. See, Ellis, S. B., et al., Mol. Cell. Biol. 5:1111-21 (1985); Koutz, P. J, et al., Yeast 5:167-77 (1989); Tschopp, J. F., et al., Nucl. Acids Res. 15:3859-76 (1987). Thus, a heterologous coding sequence, such as, for example, a polynucleotide of the present invention, under the transcriptional regulation of all or part of the AOX1 regulatory sequence is expressed at exceptionally high levels in Pichia yeast grown in the presence of methanol.

[0934] In one example, the plasmid vector pPIC9K is used to express DNA encoding a polypeptide of the invention, as set forth herein, in a Pichea yeast system essentially as described in “Pichia Protocols: Methods in Molecular Biology” D. R. Higgins and J. Cregg, eds. The Humana Press, Totowa, N.J., 1998. This expression vector allows expression and secretion of a protein of the invention by virtue of the strong AOX1 promoter linked to the Pichia pastoris alkaline phosphatase (PHO) secretory signal peptide (i.e., leader) located upstream of a multiple cloning site.

[0935] Many other yeast vectors could be used in place of pPIC9K, such as, pYES2, pYD1, pTEF1/Zeo, pYES2/GS, pPICZ, pGAPZ, pGAPZalpha, pPIC9, pPIC3.5, pHIL-D2, pHIL-S1, pPIC3.5K, and PAO815, as one skilled in the art would readily appreciate, as long as the proposed expression construct provides appropriately located signals for transcription, translation, secretion (if desired), and the like, including an in-frame AUG, as required.

[0936] In another embodiment, high-level expression of a heterologous coding sequence, such as, for example, a polynucleotide of the present invention, may be achieved by cloning the heterologous polynucleotide of the invention into an expression vector such as, for example, pGAPZ or pGAPZalpha, and growing the yeast culture in the absence of methanol.

[0937] In addition to encompassing host cells containing the vector constructs discussed herein, the invention also encompasses primary, secondary, and immortalized host cells of vertebrate origin, particularly mammalian origin, that have been engineered to delete or replace endogenous genetic material (e.g., coding sequence), and/or to include genetic material (e.g., heterologous polynucleotide sequences) that is operably associated with the polynucleotides of the invention, and which activates, alters, and/or amplifies endogenous polynucleotides. For example, techniques known in the art may be used to operably associate heterologous control regions (e.g., promoter and/or enhancer) and endogenous polynucleotide sequences via homologous recombination, resulting in the formation of a new transcription unit (see, e.g., U.S. Pat. No. 5,641,670, issued Jun. 24, 1997; U.S. Pat. No. 5,733,761, issued Mar. 31, 1998; International Publication No. WO 96/29411, published Sep. 26, 1996; International Publication No. WO 94/12650, published Aug. 4, 1994; Koller et al., Proc. Natl. Acad. Sci. USA 86:8932-8935 (1989); and Zijlstra et al., Nature 342:435-438 (1989), the disclosures of each of which are incorporated by reference in their entireties).

[0938] In addition, polypeptides of the invention can be chemically synthesized using techniques known in the art (e.g., see Creighton, 1983, Proteins: Structures and Molecular Principles, W. H. Freeman & Co., N.Y., and Hunkapiller et al., Nature, 310:105-111 (1984)). For example, a polypeptide corresponding to a fragment of a polypeptide sequence of the invention can be synthesized by use of a peptide synthesizer. Furthermore, if desired, nonclassical amino acids or chemical amino acid analogs can be introduced as a substitution or addition into the polypeptide sequence.

[0939] Non-classical amino acids include, but are not limited to, to the D-isomers of the common amino acids, 2,4-diaminobutyric acid, a-amino isobutyric acid, 4-aminobutyric acid, Abu, 2-amino butyric acid, g-Abu, e-Ahx, 6-amino hexanoic acid, Aib, 2-amino isobutyric acid, 3-amino propionic acid, ornithine, norleucine, norvaline, hydroxyproline, sarcosine, citrulline, homocitrulline, cysteic acid, t-butylglycine, t-butylalanine, phenylglycine, cyclohexylalanine, b-alanine, fluoro-amino acids, designer amino acids such as b-methyl amino acids, Ca-methyl amino acids, Na-methyl amino acids, and amino acid analogs in general. Furthermore, the amino acid can be D (dextrorotary) or L (levorotary).

[0940] The invention encompasses polypeptides which are differentially modified during or after translation, e.g., by glycosylation, acetylation, phosphorylation, amidation, derivatization by known protecting/blocking groups, proteolytic cleavage, linkage to an antibody molecule or other cellular ligand, etc. Any of numerous chemical modifications may be carried out by known techniques, including but not limited, to specific chemical cleavage by cyanogen bromide, trypsin, chymotrypsin, papain, V8 protease, NaBH4; acetylation, formylation, oxidation, reduction; metabolic synthesis in the presence of tunicamycin; etc.

[0941] Additional post-translational modifications encompassed by the invention include, for example, e.g., N-linked or O-linked carbohydrate chains, processing of N-terminal or C-terminal ends), attachment of chemical moieties to the amino acid backbone, chemical modifications of N-linked or O-linked carbohydrate chains, and addition or deletion of an N-terminal methionine residue as a result of prokaryotic host cell expression. The polypeptides may also be modified with a detectable label, such as an enzymatic, fluorescent, isotopic or affinity label to allow for detection and isolation of the protein, the addition of epitope tagged peptide fragments (e.g., FLAG, HA, GST, thioredoxin, maltose binding protein, etc.), attachment of affinity tags such as biotin and/or streptavidin, the covalent attachment of chemical moieties to the amino acid backbone, N- or C-terminal processing of the polypeptides ends (e.g., proteolytic processing), deletion of the N-terminal methionine residue, etc.

[0942] Also provided by the invention are chemically modified derivatives of the polypeptides of the invention which may provide additional advantages such as increased solubility, stability and circulating time of the polypeptide, or decreased immunogenicity (see U.S. Pat. No. 4,179,337). The chemical moieties for derivitization may be selected from water soluble polymers such as polyethylene glycol, ethylene glycol/propylene glycol copolymers, carboxymethylcellulose, dextran, polyvinyl alcohol and the like. The polypeptides may be modified at random positions within the molecule, or at predetermined positions within the molecule and may include one, two, three or more attached chemical moieties.

[0943] The invention further encompasses chemical derivitization of the polypeptides of the present invention, preferably where the chemical is a hydrophilic polymer residue. Exemplary hydrophilic polymers, including derivatives, may be those that include polymers in which the repeating units contain one or more hydroxy groups (polyhydroxy polymers), including, for example, poly(vinyl alcohol); polymers in which the repeating units contain one or more amino groups (polyamine polymers), including, for example, peptides, polypeptides, proteins and lipoproteins, such as albumin and natural lipoproteins; polymers in which the repeating units contain one or more carboxy groups (polycarboxy polymers), including, for example, carboxymethylcellulose, alginic acid and salts thereof, such as sodium and calcium alginate, glycosaminoglycans and salts thereof, including salts of hyaluronic acid, phosphorylated and sulfonated derivatives of carbohydrates, genetic material, such as interleukin-2 and interferon, and phosphorothioate oligomers; and polymers in which the repeating units contain one or more saccharide moieties (polysaccharide polymers), including, for example, carbohydrates.

[0944] The molecular weight of the hydrophilic polymers may vary, and is generally about 50 to about 5,000,000, with polymers having a molecular weight of about 100 to about 50,000 being preferred. The polymers may be branched or unbranched. More preferred polymers have a molecular weight of about 150 to about 10,000, with molecular weights of 200 to about 8,000 being even more preferred.

[0945] For polyethylene glycol, the preferred molecular weight is between about 1 kDa and about 100 kDa (the term “about” indicating that in preparations of polyethylene glycol, some molecules will weigh more, some less, than the stated molecular weight) for ease in handling and manufacturing. Other sizes may be used, depending on the desired therapeutic profile (e.g., the duration of sustained release desired, the effects, if any on biological activity, the ease in handling, the degree or lack of antigenicity and other known effects of the polyethylene glycol to a therapeutic protein or analog).

[0946] Additional preferred polymers which may be used to derivatize polypeptides of the invention, include, for example, poly(ethylene glycol) (PEG), poly(vinylpyrrolidine), polyoxomers, polysorbate and poly(vinyl alcohol), with PEG polymers being particularly preferred. Preferred among the PEG polymers are PEG polymers having a molecular weight of from about 100 to about 10,000. More preferably, the PEG polymers have a molecular weight of from about 200 to about 8,000, with PEG 2,000, PEG 5,000 and PEG 8,000, which have molecular weights of 2,000, 5,000 and 8,000, respectively, being even more preferred. Other suitable hydrophilic polymers, in addition to those exemplified above, will be readily apparent to one skilled in the art based on the present disclosure. Generally, the polymers used may include polymers that can be attached to the polypeptides of the invention via alkylation or acylation reactions.

[0947] The polyethylene glycol molecules (or other chemical moieties) should be attached to the protein with consideration of effects on functional or antigenic domains of the protein. There are a number of attachment methods available to those skilled in the art, e.g., EP 0 401 384, herein incorporated by reference (coupling PEG to G-CSF), see also Malik et al., Exp. Hematol. 20:1028-1035 (1992) (reporting pegylation of GM-CSF using tresyl chloride). For example, polyethylene glycol may be covalently bound through amino acid residues via a reactive group, such as, a free amino or carboxyl group. Reactive groups are those to which an activated polyethylene glycol molecule may be bound. The amino acid residues having a free amino group may include lysine residues and the N-terminal amino acid residues; those having a free carboxyl group may include aspartic acid residues glutamic acid residues and the C-terminal amino acid residue. Sulfhydryl groups may also be used as a reactive group for attaching the polyethylene glycol molecules. Preferred for therapeutic purposes is attachment at an amino group, such as attachment at the N-terminus or lysine group.

[0948] One may specifically desire proteins chemically modified at the N-terminus. Using polyethylene glycol as an illustration of the present composition, one may select from a variety of polyethylene glycol molecules (by molecular weight, branching, etc.), the proportion of polyethylene glycol molecules to protein (polypeptide) molecules in the reaction mix, the type of pegylation reaction to be performed, and the method of obtaining the selected N-terminally pegylated protein. The method of obtaining the N-terminally pegylated preparation (i.e., separating this moiety from other monopegylated moieties if necessary) may be by purification of the N-terminally pegylated material from a population of pegylated protein molecules. Selective proteins chemically modified at the N-terminus modification may be accomplished by reductive alkylation which exploits differential reactivity of different types of primary amino groups (lysine versus the N-terminus) available for derivatization in a particular protein. Under the appropriate reaction conditions, substantially selective derivatization of the protein at the N-terminus with a carbonyl group containing polymer is achieved.

[0949] As with the various polymers exemplified above, it is contemplated that the polymeric residues may contain functional groups in addition, for example, to those typically involved in linking the polymeric residues to the polypeptides of the present invention. Such functionalities include, for example, carboxyl, amine, hydroxy and thiol groups. These functional groups on the polymeric residues can be further reacted, if desired, with materials that are generally reactive with such functional groups and which can assist in targeting specific tissues in the body including, for example, diseased tissue. Exemplary materials which can be reacted with the additional functional groups include, for example, proteins, including antibodies, carbohydrates, peptides, glycopeptides, glycolipids, lectins, and nucleosides.

[0950] In addition to residues of hydrophilic polymers, the chemical used to derivatize the polypeptides of the present invention can be a saccharide residue. Exemplary saccharides which can be derived include, for example, monosaccharides or sugar alcohols, such as erythrose, threose, ribose, arabinose, xylose, lyxose, fructose, sorbitol, mannitol and sedoheptulose, with preferred monosaccharides being fructose, mannose, xylose, arabinose, mannitol and sorbitol; and disaccharides, such as lactose, sucrose, maltose and cellobiose. Other saccharides include, for example, inositol and ganglioside head groups. Other suitable saccharides, in addition to those exemplified above, will be readily apparent to one skilled in the art based on the present disclosure. Generally, saccharides which may be used for derivitization include saccharides that can be attached to the polypeptides of the invention via alkylation or acylation reactions.

[0951] Moreover, the invention also encompasses derivitization of the polypeptides of the present invention, for example, with lipids (including cationic, anionic, polymerized, charged, synthetic, saturated, unsaturated, and any combination of the above, etc.). stabilizing agents.

[0952] The invention encompasses derivitization of the polypeptides of the present invention, for example, with compounds that may serve a stabilizing function (e.g., to increase the polypeptides half-life in solution, to make the polypeptides more water soluble, to increase the polypeptides hydrophilic or hydrophobic character, etc.). Polymers useful as stabilizing materials may be of natural, semi-synthetic (modified natural) or synthetic origin. Exemplary natural polymers include naturally occurring polysaccharides, such as, for example, arabinans, fructans, fucans, galactans, galacturonans, glucans, mannans, xylans (such as, for example, inulin), levan, fucoidan, carrageenan, galatocarolose, pectic acid, pectins, including amylose, pullulan, glycogen, amylopectin, cellulose, dextran, dextrin, dextrose, glucose, polyglucose, polydextrose, pustulan, chitin, agarose, keratin, chondroitin, dermatan, hyaluronic acid, alginic acid, xanthin gum, starch and various other natural homopolymer or heteropolymers, such as those containing one or more of the following aldoses, ketoses, acids or amines: erythose, threose, ribose, arabinose, xylose, lyxose, allose, altrose, glucose, dextrose, mannose, gulose, idose, galactose, talose, erythrulose, ribulose, xylulose, psicose, fructose, sorbose, tagatose, mannitol, sorbitol, lactose, sucrose, trehalose, maltose, cellobiose, glycine, serine, threonine, cysteine, tyrosine, asparagine, glutamine, aspartic acid, glutamic acid, lysine, arginine, histidine, glucuronic acid, gluconic acid, glucaric acid, galacturonic acid, mannuronic acid, glucosamine, galactosamine, and neuraminic acid, and naturally occurring derivatives thereof Accordingly, suitable polymers include, for example, proteins, such as albumin, polyalginates, and polylactide-coglycolide polymers. Exemplary semi-synthetic polymers include carboxymethylcellulose, hydroxymethylcellulose, hydroxypropylmethylcellulose, methylcellulose, and methoxycellulose. Exemplary synthetic polymers include polyphosphazenes, hydroxyapatites, fluoroapatite polymers, polyethylenes (such as, for example, polyethylene glycol (including for example, the class of compounds referred to as Pluronics.RTM., commercially available from BASF, Parsippany, N.J.), polyoxyethylene, and polyethylene terephthlate), polypropylenes (such as, for example, polypropylene glycol), polyurethanes (such as, for example, polyvinyl alcohol (PVA), polyvinyl chloride and polyvinylpyrrolidone), polyamides including nylon, polystyrene, polylactic acids, fluorinated hydrocarbon polymers, fluorinated carbon polymers (such as, for example, polytetrafluoroethylene), acrylate, methacrylate, and polymethylmethacrylate, and derivatives thereof. Methods for the preparation of derivatized polypeptides of the invention which employ polymers as stabilizing compounds will be readily apparent to one skilled in the art, in view of the present disclosure, when coupled with information known in the art, such as that described and referred to in Unger, U.S. Pat. No. 5,205,290, the disclosure of which is hereby incorporated by reference herein in its entirety.

[0953] Moreover, the invention encompasses additional modifications of the polypeptides of the present invention. Such additional modifications are known in the art, and are specifically provided, in addition to methods of derivitization, etc., in U.S. Pat. No. 6,028,066, which is hereby incorporated in its entirety herein.

[0954] The polypeptides of the invention may be in monomers or multimers (i.e., dimers, trimers, tetramers and higher multimers). Accordingly, the present invention relates to monomers and multimers of the polypeptides of the invention, their preparation, and compositions (preferably, Therapeutics) containing them. In specific embodiments, the polypeptides of the invention are monomers, dimers, trimers or tetramers. In additional embodiments, the multimers of the invention are at least dimers, at least trimers, or at least tetramers.

[0955] Multimers encompassed by the invention may be homomers or heteromers. As used herein, the term homomer, refers to a multimer containing only polypeptides corresponding to the amino acid sequence of SEQ ID NO:Y or encoded by the cDNA contained in a deposited clone (including fragments, variants, splice variants, and fusion proteins, corresponding to these polypeptides as described herein). These homomers may contain polypeptides having identical or different amino acid sequences. In a specific embodiment, a homomer of the invention is a multimer containing only polypeptides having an identical amino acid sequence. In another specific embodiment, a homomer of the invention is a multimer containing polypeptides having different amino acid sequences. In specific embodiments, the multimer of the invention is a homodimer (e.g., containing polypeptides having identical or different amino acid sequences) or a homotrimer (e.g., containing polypeptides having identical and/or different amino acid sequences). In additional embodiments, the homomeric multimer of the invention is at least a homodimer, at least a homotrimer, or at least a homotetramer.

[0956] As used herein, the term heteromer refers to a multimer containing one or more heterologous polypeptides (i.e., polypeptides of different proteins) in addition to the polypeptides of the invention. In a specific embodiment, the multimer of the invention is a heterodimer, a heterotrimer, or a heterotetramer. In additional embodiments, the heteromeric multimer of the invention is at least a heterodimer, at least a heterotrimer, or at least a heterotetramer.

[0957] Multimers of the invention may be the result of hydrophobic, hydrophilic, ionic and/or covalent associations and/or may be indirectly linked, by for example, liposome formation. Thus, in one embodiment, multimers of the invention, such as, for example, homodimers or homotrimers, are formed when polypeptides of the invention contact one another in solution. In another embodiment, heteromultimers of the invention, such as, for example, heterotrimers or heterotetramers, are formed when polypeptides of the invention contact antibodies to the polypeptides of the invention (including antibodies to the heterologous polypeptide sequence in a fusion protein of the invention) in solution. In other embodiments, multimers of the invention are formed by covalent associations with and/or between the polypeptides of the invention. Such covalent associations may involve one or more amino acid residues contained in the polypeptide sequence (e.g., that recited in the sequence listing, or contained in the polypeptide encoded by a deposited clone). In one instance, the covalent associations are cross-linking between cysteine residues located within the polypeptide sequences which interact in the native (i.e., naturally occurring) polypeptide. In another instance, the covalent associations are the consequence of chemical or recombinant manipulation. Alternatively, such covalent associations may involve one or more amino acid residues contained in the heterologous polypeptide sequence in a fusion protein of the invention.

[0958] In one example, covalent associations are between the heterologous sequence contained in a fusion protein of the invention (see, e.g., U.S. Pat. No. 5,478,925). In a specific example, the covalent associations are between the heterologous sequence contained in an Fc fusion protein of the invention (as described herein). In another specific example, covalent associations of fusion proteins of the invention are between heterologous polypeptide sequence from another protein that is capable of forming covalently associated multimers, such as for example, osteoprotegerin (see, e.g., International Publication NO: WO 98/49305, the contents of which are herein incorporated by reference in its entirety). In another embodiment, two or more polypeptides of the invention are joined through peptide linkers. Examples include those peptide linkers described in U.S. Pat. No. 5,073,627 (hereby incorporated by reference). Proteins comprising multiple polypeptides of the invention separated by peptide linkers may be produced using conventional recombinant DNA technology.

[0959] Another method for preparing multimer polypeptides of the invention involves use of polypeptides of the invention fused to a leucine zipper or isoleucine zipper polypeptide sequence. Leucine zipper and isoleucine zipper domains are polypeptides that promote multimerization of the proteins in which they are found. Leucine zippers were originally identified in several DNA-binding proteins (Landschulz et al., Science 240:1759, (1988)), and have since been found in a variety of different proteins. Among the known leucine zippers are naturally occurring peptides and derivatives thereof that dimerize or trimerize. Examples of leucine zipper domains suitable for producing soluble multimeric proteins of the invention are those described in PCT application WO 94/10308, hereby incorporated by reference. Recombinant fusion proteins comprising a polypeptide of the invention fused to a polypeptide sequence that dimerizes or trimerizes in solution are expressed in suitable host cells, and the resulting soluble multimeric fusion protein is recovered from the culture supernatant using techniques known in the art.

[0960] Trimeric polypeptides of the invention may offer the advantage of enhanced biological activity. Preferred leucine zipper moieties and isoleucine moieties are those that preferentially form trimers. One example is a leucine zipper derived from lung surfactant protein D (SPD), as described in Hoppe et al. (FEBS Letters 344:191, (1994)) and in U.S. patent application Ser. No. 08/446,922, hereby incorporated by reference. Other peptides derived from naturally occurring trimeric proteins may be employed in preparing trimeric polypeptides of the invention.

[0961] In another example, proteins of the invention are associated by interactions between Flag® polypeptide sequence contained in fusion proteins of the invention containing Flag® polypeptide sequence. In a further embodiment, associations proteins of the invention are associated by interactions between heterologous polypeptide sequence contained in Flag® fusion proteins of the invention and anti-Flag® antibody.

[0962] The multimers of the invention may be generated using chemical techniques known in the art. For example, polypeptides desired to be contained in the multimers of the invention may be chemically cross-linked using linker molecules and linker molecule length optimization techniques known in the art (see, e.g., U.S. Pat. No. 5,478,925, which is herein incorporated by reference in its entirety). Additionally, multimers of the invention may be generated using techniques known in the art to form one or more inter-molecule cross-links between the cysteine residues located within the sequence of the polypeptides desired to be contained in the multimer (see, e.g., U.S. Pat. No. 5,478,925, which is herein incorporated by reference in its entirety). Further, polypeptides of the invention may be routinely modified by the addition of cysteine or biotin to the C terminus or N-terminus of the polypeptide and techniques known in the art may be applied to generate multimers containing one or more of these modified polypeptides (see, e.g., U.S. Pat. No. 5,478,925, which is herein incorporated by reference in its entirety). Additionally, techniques known in the art may be applied to generate liposomes containing the polypeptide components desired to be contained in the multimer of the invention (see, e.g., U.S. Pat. No. 5,478,925, which is herein incorporated by reference in its entirety).

[0963] Alternatively, multimers of the invention may be generated using genetic engineering techniques known in the art. In one embodiment, polypeptides contained in multimers of the invention are produced recombinantly using fusion protein technology described herein or otherwise known in the art (see, e.g., U.S. Pat. No. 5,478,925, which is herein incorporated by reference in its entirety). In a specific embodiment, polynucleotides coding for a homodimer of the invention are generated by ligating a polynucleotide sequence encoding a polypeptide of the invention to a sequence encoding a linker polypeptide and then further to a synthetic polynucleotide encoding the translated product of the polypeptide in the reverse orientation from the original C-terminus to the N-terminus (lacking the leader sequence) (see, e.g., U.S. Pat. No. 5,478,925, which is herein incorporated by reference in its entirety). In another embodiment, recombinant techniques described herein or otherwise known in the art are applied to generate recombinant polypeptides of the invention which contain a transmembrane domain (or hydrophobic or signal peptide) and which can be incorporated by membrane reconstitution techniques into liposomes (see, e.g., U.S. Pat. No. 5,478,925, which is herein incorporated by reference in its entirety).

[0964] In addition, the polynucleotide insert of the present invention could be operatively linked to “artificial” or chimeric promoters and transcription factors. Specifically, the artificial promoter could comprise, or alternatively consist, of any combination of cis-acting DNA sequence elements that are recognized by trans-acting transcription factors. Preferably, the cis acting DNA sequence elements and trans-acting transcription factors are operable in mammals. Further, the trans-acting transcription factors of such “artificial” promoters could also be “artificial” or chimeric in design themselves and could act as activators or repressors to said “artificial” promoter.

[0965] Uses of the Polynucleotides

[0966] Each of the polynucleotides identified herein can be used in numerous ways as reagents. The following description should be considered exemplary and utilizes known techniques.

[0967] The polynucleotides of the present invention are useful for chromosome identification. There exists an ongoing need to identify new chromosome markers, since few chromosome marking reagents, based on actual sequence data (repeat polymorphisms), are presently available. Each polynucleotide of the present invention can be used as a chromosome marker.

[0968] Briefly, sequences can be mapped to chromosomes by preparing PCR primers (preferably 15-25 bp) from the sequences shown in SEQ ID NO:X. Primers can be selected using computer analysis so that primers do not span more than one predicted exon in the genomic DNA. These primers are then used for PCR screening of somatic cell hybrids containing individual human chromosomes. Only those hybrids containing the human gene corresponding to the SEQ ID NO:X will yield an amplified fragment.

[0969] Similarly, somatic hybrids provide a rapid method of PCR mapping the polynucleotides to particular chromosomes. Three or more clones can be assigned per day using a single thermal cycler. Moreover, sublocalization of the polynucleotides can be achieved with panels of specific chromosome fragments. Other gene mapping strategies that can be used include in situ hybridization, prescreening with labeled flow-sorted chromosomes, and preselection by hybridization to construct chromosome specific-cDNA libraries.

[0970] Precise chromosomal location of the polynucleotides can also be achieved using fluorescence in situ hybridization (FISH) of a metaphase chromosomal spread. This technique uses polynucleotides as short as 500 or 600 bases; however, polynucleotides 2,000-4,000 bp are preferred. For a review of this technique, see Verma et al., “Human Chromosomes: a Manual of Basic Techniques” Pergamon Press, New York (1988).

[0971] For chromosome mapping, the polynucleotides can be used individually (to mark a single chromosome or a single site on that chromosome) or in panels (for marking multiple sites and/or multiple chromosomes). Preferred polynucleotides correspond to the noncoding regions of the cDNAs because the coding sequences are more likely conserved within gene families, thus increasing the chance of cross hybridization during chromosomal mapping.

[0972] Once a polynucleotide has been mapped to a precise chromosomal location, the physical position of the polynucleotide can be used in linkage analysis. Linkage analysis establishes coinheritance between a chromosomal location and presentation of a particular disease. Disease mapping data are known in the art. Assuming 1 megabase mapping resolution and one gene per 20 kb, a cDNA precisely localized to a chromosomal region associated with the disease could be one of 50-500 potential causative genes.

[0973] Thus, once coinheritance is established, differences in the polynucleotide and the corresponding gene between affected and unaffected organisms can be examined. First, visible structural alterations in the chromosomes, such as deletions or translocations, are examined in chromosome spreads or by PCR. If no structural alterations exist, the presence of point mutations are ascertained. Mutations observed in some or all affected organisms, but not in normal organisms, indicates that the mutation may cause the disease. However, complete sequencing of the polypeptide and the corresponding gene from several normal organisms is required to distinguish the mutation from a polymorphism. If a new polymorphism is identified, this polymorphic polypeptide can be used for further linkage analysis.

[0974] Furthermore, increased or decreased expression of the gene in affected organisms as compared to unaffected organisms can be assessed using polynucleotides of the present invention. Any of these alterations (altered expression, chromosomal rearrangement, or mutation) can be used as a diagnostic or prognostic marker.

[0975] Thus, the invention also provides a diagnostic method useful during diagnosis of a disorder, involving measuring the expression level of polynucleotides of the present invention in cells or body fluid from an organism and comparing the measured gene expression level with a standard level of polynucleotide expression level, whereby an increase or decrease in the gene expression level compared to the standard is indicative of a disorder.

[0976] By “measuring the expression level of a polynucleotide of the present invention” is intended qualitatively or quantitatively measuring or estimating the level of the polypeptide of the present invention or the level of the mRNA encoding the polypeptide in a first biological sample either directly (e.g., by determining or estimating absolute protein level or mRNA level) or relatively (e.g., by comparing to the polypeptide level or mRNA level in a second biological sample). Preferably, the polypeptide level or mRNA level in the first biological sample is measured or estimated and compared to a standard polypeptide level or mRNA level, the standard being taken from a second biological sample obtained from an individual not having the disorder or being determined by averaging levels from a population of organisms not having a disorder. As will be appreciated in the art, once a standard polypeptide level or mRNA level is known, it can be used repeatedly as a standard for comparison.

[0977] By “biological sample” is intended any biological sample obtained from an organism, body fluids, cell line, tissue culture, or other source which contains the polypeptide of the present invention or mRNA. As indicated, biological samples include body fluids (such as the following non-limiting examples, sputum, amniotic fluid, urine, saliva, breast milk, secretions, interstitial fluid, blood, serum, spinal fluid, etc.) which contain the polypeptide of the present invention, and other tissue sources found to express the polypeptide of the present invention. Methods for obtaining tissue biopsies and body fluids from organisms are well known in the art. Where the biological sample is to include mRNA, a tissue biopsy is the preferred source.

[0978] The method(s) provided above may Preferably be applied in a diagnostic method and/or kits in which polynucleotides and/or polypeptides are attached to a solid support. In one exemplary method, the support may be a “gene chip” or a “biological chip” as described in U.S. Pat. Nos. 5,837,832, 5,874,219, and 5,856,174. Further, such a gene chip with polynucleotides of the present invention attached may be used to identify polymorphisms between the polynucleotide sequences, with polynucleotides isolated from a test subject. The knowledge of such polymorphisms (i.e. their location, as well as, their existence) would be beneficial in identifying disease loci for many disorders, including proliferative diseases and conditions. Such a method is described in U.S. Pat. Nos. 5,858,659 and 5,856,104. The US Patents referenced supra are hereby incorporated by reference in their entirety herein.

[0979] The present invention encompasses polynucleotides of the present invention that are chemically synthesized, or reproduced as peptide nucleic acids (PNA), or according to other methods known in the art. The use of PNAs would serve as the preferred form if the polynucleotides are incorporated onto a solid support, or gene chip. For the purposes of the present invention, a peptide nucleic acid (PNA) is a polyamide type of DNA analog and the monomeric units for adenine, guanine, thymine and cytosine are available commercially (Perceptive Biosystems). Certain components of DNA, such as phosphorus, phosphorus oxides, or deoxyribose derivatives, are not present in PNAs. As disclosed by P. E. Nielsen, M. Egholm, R. H. Berg and O. Buchardt, Science 254, 1497 (1991); and M. Egholm, O. Buchardt, L. Christensen, C. Behrens, S. M. Freier, D. A. Driver, R. H. Berg, S. K. Kim, B. Norden, and P. E. Nielsen, Nature 365, 666 (1993), PNAs bind specifically and tightly to complementary DNA strands and are not degraded by nucleases. In fact, PNA binds more strongly to DNA than DNA itself does. This is probably because there is no electrostatic repulsion between the two strands, and also the polyamide backbone is more flexible. Because of this, PNA/DNA duplexes bind under a wider range of stringency conditions than DNA/DNA duplexes, making it easier to perform multiplex hybridization. Smaller probes can be used than with DNA due to the stronger binding characteristics of PNA:DNA hybrids. In addition, it is more likely that single base mismatches can be determined with PNA/DNA hybridization because a single mismatch in a PNA/DNA 15-mer lowers the melting point (T.sub.m) by 8°-20° C., vs. 4°-16° C. for the DNA/DNA 15-mer duplex. Also, the absence of charge groups in PNA means that hybridization can be done at low ionic strengths and reduce possible interference by salt during the analysis.

[0980] In addition to the foregoing, a polynucleotide can be used to control gene expression through triple helix formation or antisense DNA or RNA. Antisense techniques are discussed, for example, in Okano, J. Neurochem. 56: 560 (1991); “Oligodeoxynucleotides as Antisense Inhibitors of Gene Expression”, CRC Press, Boca Raton, Fla. (1988). Triple helix formation is discussed in, for instance Lee et al., Nucleic Acids Research 6: 3073 (1979); Cooney et al., Science 241: 456 (1988); and Dervan et al., Science 251: 1360 (1991). Both methods rely on binding of the polynucleotide to a complementary DNA or RNA. For these techniques, preferred polynucleotides are usually oligonucleotides 20 to 40 bases in length and complementary to either the region of the gene involved in transcription (triple helix—see Lee et al., Nucl. Acids Res. 6:3073 (1979); Cooney et al., Science 241:456 (1988); and Dervan et al., Science 251:1360 (1991) ) or to the mRNA itself (antisense—Okano, J. Neurochem. 56:560 (1991); Oligodeoxy-nucleotides as Antisense Inhibitors of Gene Expression, CRC Press, Boca Raton, Fla. (1988).) Triple helix formation optimally results in a shut-off of RNA transcription from DNA, while antisense RNA hybridization blocks translation of an mRNA molecule into polypeptide. Both techniques are effective in model systems, and the information disclosed herein can be used to design antisense or triple helix polynucleotides in an effort to treat or prevent disease.

[0981] The present invention encompasses the addition of a nuclear localization signal, operably linked to the 5′ end, 3′ end, or any location therein, to any of the oligonucleotides, antisense oligonucleotides, triple helix oligonucleotides, ribozymes, PNA oligonucleotides, and/or polynucleotides, of the present invention. See, for example, G. Cutrona, et al., Nat. Biotech., 18:300-303, (2000); which is hereby incorporated herein by reference.

[0982] Polynucleotides of the present invention are also useful in gene therapy. One goal of gene therapy is to insert a normal gene into an organism having a defective gene, in an effort to correct the genetic defect. The polynucleotides disclosed in the present invention offer a means of targeting such genetic defects in a highly accurate manner. Another goal is to insert a new gene that was not present in the host genome, thereby producing a new trait in the host cell. In one example, polynucleotide sequences of the present invention may be used to construct chimeric RNA/DNA oligonucleotides corresponding to said sequences, specifically designed to induce host cell mismatch repair mechanisms in an organism upon systemic injection, for example (Bartlett, R. J., et al., Nat. Biotech, 18:615-622 (2000), which is hereby incorporated by reference herein in its entirety). Such RNA/DNA oligonucleotides could be designed to correct genetic defects in certain host strains, and/or to introduce desired phenotypes in the host (e.g., introduction of a specific polymorphism within an endogenous gene corresponding to a polynucleotide of the present invention that may ameliorate and/or prevent a disease symptom and/or disorder, etc.). Alternatively, the polynucleotide sequence of the present invention may be used to construct duplex oligonucleotides corresponding to said sequence, specifically designed to correct genetic defects in certain host strains, and/or to introduce desired phenotypes into the host (e.g., introduction of a specific polymorphism within an endogenous gene corresponding to a polynucleotide of the present invention that may ameliorate and/or prevent a disease symptom and/or disorder, etc). Such methods of using duplex oligonucleotides are known in the art and are encompassed by the present invention (see EP 1007712, which is hereby incorporated by reference herein in its entirety).

[0983] The polynucleotides are also useful for identifying organisms from minute biological samples. The United States military, for example, is considering the use of restriction fragment length polymorphism (RFLP) for identification of its personnel. In this technique, an individual's genomic DNA is digested with one or more restriction enzymes, and probed on a Southern blot to yield unique bands for identifying personnel. This method does not suffer from the current limitations of “Dog Tags” which can be lost, switched, or stolen, making positive identification difficult. The polynucleotides of the present invention can be used as additional DNA markers for RFLP.

[0984] The polynucleotides of the present invention can also be used as an alternative to RFLP, by determining the actual base-by-base DNA sequence of selected portions of an organisms genome. These sequences can be used to prepare PCR primers for amplifying and isolating such selected DNA, which can then be sequenced. Using this technique, organisms can be identified because each organism will have a unique set of DNA sequences. Once an unique ID database is established for an organism, positive identification of that organism, living or dead, can be made from extremely small tissue samples. Similarly, polynucleotides of the present invention can be used as polymorphic markers, in addition to, the identification of transformed or non-transformed cells and/or tissues.

[0985] There is also a need for reagents capable of identifying the source of a particular tissue. Such need arises, for example, when presented with tissue of unknown origin. Appropriate reagents can comprise, for example, DNA probes or primers specific to particular tissue prepared from the sequences of the present invention. Panels of such reagents can identify tissue by species and/or by organ type. In a similar fashion, these reagents can be used to screen tissue cultures for contamination. Moreover, as mentioned above, such reagents can be used to screen and/or identify transformed and non-transformed cells and/or tissues.

[0986] In the very least, the polynucleotides of the present invention can be used as molecular weight markers on Southern gels, as diagnostic probes for the presence of a specific mRNA in a particular cell type, as a probe to “subtract-out” known sequences in the process of discovering novel polynucleotides, for selecting and making oligomers for attachment to a “gene chip” or other support, to raise anti-DNA antibodies using DNA immunization techniques, and as an antigen to elicit an immune response.

[0987] Uses of the Polypeptides

[0988] Each of the polypeptides identified herein can be used in numerous ways. The following description should be considered exemplary and utilizes known techniques.

[0989] A polypeptide of the present invention can be used to assay protein levels in a biological sample using antibody-based techniques. For example, protein expression in tissues can be studied with classical immunohistological methods. (Jalkanen, M., et al., J. Cell. Biol. 101:976-985 (1985); Jalkanen, M., et al., J. Cell . Biol. 105:3087-3096 (1987).) Other antibody-based methods useful for detecting protein gene expression include immunoassays, such as the enzyme linked immunosorbent assay (ELISA) and the radioimmunoassay (RIA). Suitable antibody assay labels are known in the art and include enzyme labels, such as, glucose oxidase, and radioisotopes, such as iodine (125I, 121I), carbon (14C), sulfur (35S), tritium (3H), indium (121In), and technetium (99mTc), and fluorescent labels, such as fluorescein and rhodamine, and biotin.

[0990] In addition to assaying protein levels in a biological sample, proteins can also be detected in vivo by imaging. Antibody labels or markers for in vivo imaging of protein include those detectable by X-radiography, NMR or ESR. For X-radiography, suitable labels include radioisotopes such as barium or cesium, which emit detectable radiation but are not overtly harmful to the subject. Suitable markers for NMR and ESR include those with a detectable characteristic spin, such as deuterium, which may be incorporated into the antibody by labeling of nutrients for the relevant hybridoma.

[0991] A protein-specific antibody or antibody fragment which has been labeled with an appropriate detectable imaging moiety, such as a radioisotope (for example, 131I, 112In, 99mTc), a radio-opaque substance, or a material detectable by nuclear magnetic resonance, is introduced (for example, parenterally, subcutaneously, or intraperitoneally) into the mammal. It will be understood in the art that the size of the subject and the imaging system used will determine the quantity of imaging moiety needed to produce diagnostic images. In the case of a radioisotope moiety, for a human subject, the quantity of radioactivity injected will normally range from about 5 to 20 millicuries of 99mTc. The labeled antibody or antibody fragment will then preferentially accumulate at the location of cells which contain the specific protein. In vivo tumor imaging is described in S. W. Burchiel et al., “Immunopharmacokinetics of Radiolabeled Antibodies and Their Fragments.” (Chapter 13 in Tumor Imaging: The Radiochemical Detection of Cancer, S. W. Burchiel and B. A. Rhodes, eds., Masson Publishing Inc. (1982).)

[0992] Thus, the invention provides a diagnostic method of a disorder, which involves (a) assaying the expression of a polypeptide of the present invention in cells or body fluid of an individual; (b) comparing the level of gene expression with a standard gene expression level, whereby an increase or decrease in the assayed polypeptide gene expression level compared to the standard expression level is indicative of a disorder. With respect to cancer, the presence of a relatively high amount of transcript in biopsied tissue from an individual may indicate a predisposition for the development of the disease, or may provide a means for detecting the disease prior to the appearance of actual clinical symptoms. A more definitive diagnosis of this type may allow health professionals to employ preventative measures or aggressive treatment earlier thereby preventing the development or further progression of the cancer.

[0993] Moreover, polypeptides of the present invention can be used to treat, prevent, and/or diagnose disease. For example, patients can be administered a polypeptide of the present invention in an effort to replace absent or decreased levels of the polypeptide (e.g., insulin), to supplement absent or decreased levels of a different polypeptide (e.g., hemoglobin S for hemoglobin B, SOD, catalase, DNA repair proteins), to inhibit the activity of a polypeptide (e.g., an oncogene or tumor suppressor), to activate the activity of a polypeptide (e.g., by binding to a receptor), to reduce the activity of a membrane bound receptor by competing with it for free ligand (e.g., soluble TNF receptors used in reducing inflammation), or to bring about a desired response (e.g., blood vessel growth inhibition, enhancement of the immune response to proliferative cells or tissues).

[0994] Similarly, antibodies directed to a polypeptide of the present invention can also be used to treat, prevent, and/or diagnose disease. For example, administration of an antibody directed to a polypeptide of the present invention can bind and reduce overproduction of the polypeptide. Similarly, administration of an antibody can activate the polypeptide, such as by binding to a polypeptide bound to a membrane (receptor).

[0995] At the very least, the polypeptides of the present invention can be used as molecular weight markers on SDS-PAGE gels or on molecular sieve gel filtration columns using methods well known to those of skill in the art. Polypeptides can also be used to raise antibodies, which in turn are used to measure protein expression from a recombinant cell, as a way of assessing transformation of the host cell. Moreover, the polypeptides of the present invention can be used to test the following biological activities.

[0996] Gene Therapy Methods

[0997] Another aspect of the present invention is to gene therapy methods for treating or preventing disorders, diseases and conditions. The gene therapy methods relate to the introduction of nucleic acid (DNA, RNA and antisense DNA or RNA) sequences into an animal to achieve expression of a polypeptide of the present invention. This method requires a polynucleotide which codes for a polypeptide of the invention that operatively linked to a promoter and any other genetic elements necessary for the expression of the polypeptide by the target tissue. Such gene therapy and delivery techniques are known in the art, see, for example, WO90/11092, which is herein incorporated by reference.

[0998] Thus, for example, cells from a patient may be engineered with a polynucleotide (DNA or RNA) comprising a promoter operably linked to a polynucleotide of the invention ex vivo, with the engineered cells then being provided to a patient to be treated with the polypeptide. Such methods are well-known in the art. For example, see Belldegrun et al., J. Natl. Cancer Inst., 85:207-216 (1993); Ferrantini et al., Cancer Research, 53:107-1112 (1993); Ferrantini et al., J. Immunology 153: 4604-4615 (1994); Kaido, T., et al., Int. J. Cancer 60: 221-229 (1995); Ogura et al., Cancer Research 50: 5102-5106 (1990); Santodonato, et al., Human Gene Therapy 7:1-10 (1996); Santodonato, et al., Gene Therapy 4:1246-1255 (1997); and Zhang, et al., Cancer Gene Therapy 3: 31-38 (1996)), which are herein incorporated by reference. In one embodiment, the cells which are engineered are arterial cells. The arterial cells may be reintroduced into the patient through direct injection to the artery, the tissues surrounding the artery, or through catheter injection.

[0999] As discussed in more detail below, the polynucleotide constructs can be delivered by any method that delivers injectable materials to the cells of an animal, such as, injection into the interstitial space of tissues (heart, muscle, skin, lung, liver, and the like). The polynucleotide constructs may be delivered in a pharmaceutically acceptable liquid or aqueous carrier.

[1000] In one embodiment, the polynucleotide of the invention is delivered as a naked polynucleotide. The term “naked” polynucleotide, DNA or RNA refers to sequences that are free from any delivery vehicle that acts to assist, promote or facilitate entry into the cell, including viral sequences, viral particles, liposome formulations, lipofectin or precipitating agents and the like. However, the polynucleotides of the invention can also be delivered in liposome formulations and lipofectin formulations and the like can be prepared by methods well known to those skilled in the art. Such methods are described, for example, in U.S. Pat. Nos. 5,593,972, 5,589,466, and 5,580,859, which are herein incorporated by reference.

[1001] The polynucleotide vector constructs of the invention used in the gene therapy method are preferably constructs that will not integrate into the host genome nor will they contain sequences that allow for replication. Appropriate vectors include pWLNEO, pSV2CAT, pQG44, pXT1 and pSG available from Stratagene; pSVK3, pBPV, pMSG and pSVL available from Pharmacia; and pEF1/V5, pcDNA3.1, and pRc/CMV2 available from Invitrogen. Other suitable vectors will be readily apparent to the skilled artisan.

[1002] Any strong promoter known to those skilled in the art can be used for driving the expression of polynucleotide sequence of the invention. Suitable promoters include adenoviral promoters, such as the adenoviral major late promoter; or heterologous promoters, such as the cytomegalovirus (CMV) promoter; the respiratory syncytial virus (RSV) promoter; inducible promoters, such as the MMT promoter, the metallothionein promoter; heat shock promoters; the albumin promoter; the ApoAI promoter; human globin promoters; viral thymidine kinase promoters, such as the Herpes Simplex thymidine kinase promoter; retroviral LTRs; the b-actin promoter; and human growth hormone promoters. The promoter also may be the native promoter for the polynucleotides of the invention.

[1003] Unlike other gene therapy techniques, one major advantage of introducing naked nucleic acid sequences into target cells is the transitory nature of the polynucleotide synthesis in the cells. Studies have shown that non-replicating DNA sequences can be introduced into cells to provide production of the desired polypeptide for periods of up to six months.

[1004] The polynucleotide construct of the invention can be delivered to the interstitial space of tissues within the an animal, including of muscle, skin, brain, lung, liver, spleen, bone marrow, thymus, heart, lymph, blood, bone, cartilage, pancreas, kidney, gall bladder, stomach, intestine, testis, ovary, uterus, rectum, nervous system, eye, gland, and connective tissue. Interstitial space of the tissues comprises the intercellular, fluid, mucopolysaccharide matrix among the reticular fibers of organ tissues, elastic fibers in the walls of vessels or chambers, collagen fibers of fibrous tissues, or that same matrix within connective tissue ensheathing muscle cells or in the lacunae of bone. It is similarly the space occupied by the plasma of the circulation and the lymph fluid of the lymphatic channels. Delivery to the interstitial space of muscle tissue is preferred for the reasons discussed below. They may be conveniently delivered by injection into the tissues comprising these cells. They are preferably delivered to and expressed in persistent, non-dividing cells which are differentiated, although delivery and expression may be achieved in non-differentiated or less completely differentiated cells, such as, for example, stem cells of blood or skin fibroblasts. In vivo muscle cells are particularly competent in their ability to take up and express polynucleotides.

[1005] For the naked nucleic acid sequence injection, an effective dosage amount of DNA or RNA will be in the range of from about 0.05 mg/kg body weight to about 50 mg/kg body weight. Preferably the dosage will be from about 0.005 mg/kg to about 20 mg/kg and more preferably from about 0.05 mg/kg to about 5 mg/kg. Of course, as the artisan of ordinary skill will appreciate, this dosage will vary according to the tissue site of injection. The appropriate and effective dosage of nucleic acid sequence can readily be determined by those of ordinary skill in the art and may depend on the condition being treated and the route of administration.

[1006] The preferred route of administration is by the parenteral route of injection into the interstitial space of tissues. However, other parenteral routes may also be used, such as, inhalation of an aerosol formulation particularly for delivery to lungs or bronchial tissues, throat or mucous membranes of the nose. In addition, naked DNA constructs can be delivered to arteries during angioplasty by the catheter used in the procedure.

[1007] The naked polynucleotides are delivered by any method known in the art, including, but not limited to, direct needle injection at the delivery site, intravenous injection, topical administration, catheter infusion, and so-called “gene guns”. These delivery methods are known in the art.

[1008] The constructs may also be delivered with delivery vehicles such as viral sequences, viral particles, liposome formulations, lipofectin, precipitating agents, etc. Such methods of delivery are known in the art.

[1009] In certain embodiments, the polynucleotide constructs of the invention are complexed in a liposome preparation. Liposomal preparations for use in the instant invention include cationic (positively charged), anionic (negatively charged) and neutral preparations. However, cationic liposomes are particularly preferred because a tight charge complex can be formed between the cationic liposome and the polyanionic nucleic acid. Cationic liposomes have been shown to mediate intracellular delivery of plasmid DNA (Felgner et al., Proc. Natl. Acad. Sci. USA, 84:7413-7416 (1987), which is herein incorporated by reference); mRNA (Malone et al., Proc. Natl. Acad. Sci. USA , 86:6077-6081 (1989), which is herein incorporated by reference); and purified transcription factors (Debs et al., J. Biol. Chem., 265:10189-10192 (1990), which is herein incorporated by reference), in functional form.

[1010] Cationic liposomes are readily available. For example, N[1,2,3-dioleyloxy)propyl]-N,N,N-triethylammonium (DOTMA) liposomes are particularly useful and are available under the trademark Lipofectin, from GIBCO BRL, Grand Island, N.Y. (See, also, Felgner et al., Proc. Natl. Acad. Sci. USA , 84:7413-7416 (1987), which is herein incorporated by reference). Other commercially available liposomes include transfectace (DDAB/DOPE) and DOTAP/DOPE (Boehringer).

[1011] Other cationic liposomes can be prepared from readily available materials using techniques well known in the art. See, e.g. PCT Publication NO: WO 90/11092 (which is herein incorporated by reference) for a description of the synthesis of DOTAP (1,2-bis(oleoyloxy)-3-(trimethylammonio)propane) liposomes. Preparation of DOTMA liposomes is explained in the literature, see, e.g., Felgner et al., Proc. Natl. Acad. Sci. USA, 84:7413-7417, which is herein incorporated by reference. Similar methods can be used to prepare liposomes from other cationic lipid materials.

[1012] Similarly, anionic and neutral liposomes are readily available, such as from Avanti Polar Lipids (Birmingham, Ala.), or can be easily prepared using readily available materials. Such materials include phosphatidyl, choline, cholesterol, phosphatidyl ethanolamine, dioleoylphosphatidyl choline (DOPC), dioleoylphosphatidyl glycerol (DOPG), dioleoylphoshatidyl ethanol amine (DOPE), among others. These materials can also be mixed with the DOTMA and DOTAP starting materials in appropriate ratios. Methods for making liposomes using these materials are well known in the art.

[1013] For example, commercially dioleoylphosphatidyl choline (DOPC), dioleoylphosphatidyl glycerol (DOPG), and dioleoylphosphatidyl ethanolamine (DOPE) can be used in various combinations to make conventional liposomes, with or without the addition of cholesterol. Thus, for example, DOPG/DOPC vesicles can be prepared by drying 50 mg each of DOPG and DOPC under a stream of nitrogen gas into a sonication vial. The sample is placed under a vacuum pump overnight and is hydrated the following day with deionized water. The sample is then sonicated for 2 hours in a capped vial, using a Heat Systems model 350 sonicator equipped with an inverted cup (bath type) probe at the maximum setting while the bath is circulated at 15EC. Alternatively, negatively charged vesicles can be prepared without sonication to produce multilamellar vesicles or by extrusion through nucleopore membranes to produce unilamellar vesicles of discrete size. Other methods are known and available to those of skill in the art.

[1014] The liposomes can comprise multilamellar vesicles (MLVs), small unilamellar vesicles (SUVs), or large unilamellar vesicles (LUVs), with SUVs being preferred. The various liposome-nucleic acid complexes are prepared using methods well known in the art. See, e.g., Straubinger et al., Methods of Immunology, 101:512-527 (1983), which is herein incorporated by reference. For example, MLVs containing nucleic acid can be prepared by depositing a thin film of phospholipid on the walls of a glass tube and subsequently hydrating with a solution of the material to be encapsulated. SUVs are prepared by extended sonication of MLVs to produce a homogeneous population of unilamellar liposomes. The material to be entrapped is added to a suspension of preformed MLVs and then sonicated. When using liposomes containing cationic lipids, the dried lipid film is resuspended in an appropriate solution such as sterile water or an isotonic buffer solution such as 10 mM Tris/NaCl, sonicated, and then the preformed liposomes are mixed directly with the DNA. The liposome and DNA form a very stable complex due to binding of the positively charged liposomes to the cationic DNA. SUVs find use with small nucleic acid fragments. LUVs are prepared by a number of methods, well known in the art. Commonly used methods include Ca2+-EDTA chelation (Papahadjopoulos et al., Biochim. Biophys. Acta, 394:483 (1975); Wilson et al., Cell , 17:77 (1979)); ether injection (Deamer et al., Biochim. Biophys. Acta, 443:629 (1976); Ostro et al., Biochem. Biophys. Res. Commun., 76:836 (1977); Fraley et al., Proc. Natl. Acad. Sci. USA, 76:3348 (1979)); detergent dialysis (Enoch et al., Proc. Natl. Acad. Sci. USA , 76:145 (1979)); and reverse-phase evaporation (REV) (Fraley et al., J. Biol. Chem., 255:10431 (1980); Szoka et al., Proc. Natl. Acad. Sci. USA , 75:145 (1978); Schaefer-Ridder et al., Science, 215:166 (1982)), which are herein incorporated by reference.

[1015] Generally, the ratio of DNA to liposomes will be from about 10:1 to about 1:10. Preferably, the ration will be from about 5:1 to about 1:5. More preferably, the ration will be about 3:1 to about 1:3. Still more preferably, the ratio will be about 1:1.

[1016] U.S. Pat. No. 5,676,954 (which is herein incorporated by reference) reports on the injection of genetic material, complexed with cationic liposomes carriers, into mice. U.S. Pat. Nos. 4,897,355, 4,946,787, 5,049,386, 5,459,127, 5,589,466, 5,693,622, 5,580,859, 5,703,055, and international publication NO: WO 94/9469 (which are herein incorporated by reference) provide cationic lipids for use in transfecting DNA into cells and mammals. U.S. Pat. Nos. 5,589,466, 5,693,622, 5,580,859, 5,703,055, and international publication NO: WO 94/9469 (which are herein incorporated by reference) provide methods for delivering DNA-cationic lipid complexes to mammals.

[1017] In certain embodiments, cells are engineered, ex vivo or in vivo, using a retroviral particle containing RNA which comprises a sequence encoding polypeptides of the invention. Retroviruses from which the retroviral plasmid vectors may be derived include, but are not limited to, Moloney Murine Leukemia Virus, spleen necrosis virus, Rous sarcoma Virus, Harvey Sarcoma Virus, avian leukosis virus, gibbon ape leukemia virus, human immunodeficiency virus, Myeloproliferative Sarcoma Virus, and mammary tumor virus.

[1018] The retroviral plasmid vector is employed to transduce packaging cell lines to form producer cell lines. Examples of packaging cells which may be transfected include, but are not limited to, the PE501, PA317, R-2, R-AM, PA12, T19-14X, VT-19-17-H2, RCRE, RCRIP, GP+E-86, GP+envAm12, and DAN cell lines as described in Miller, Human Gene Therapy , 1:5-14 (1990), which is incorporated herein by reference in its entirety. The vector may transduce the packaging cells through any means known in the art. Such means include, but are not limited to, electroporation, the use of liposomes, and CaPO4 precipitation. In one alternative, the retroviral plasmid vector may be encapsulated into a liposome, or coupled to a lipid, and then administered to a host.

[1019] The producer cell line generates infectious retroviral vector particles which include polynucleotide encoding polypeptides of the invention. Such retroviral vector particles then may be employed, to transduce eukaryotic cells, either in vitro or in vivo. The transduced eukaryotic cells will express polypeptides of the invention.

[1020] In certain other embodiments, cells are engineered, ex vivo or in vivo, with polynucleotides of the invention contained in an adenovirus vector. Adenovirus can be manipulated such that it encodes and expresses polypeptides of the invention, and at the same time is inactivated in terms of its ability to replicate in a normal lytic viral life cycle. Adenovirus expression is achieved without integration of the viral DNA into the host cell chromosome, thereby alleviating concerns about insertional mutagenesis. Furthermore, adenoviruses have been used as live enteric vaccines for many years with an excellent safety profile (Schwartzet al., Am. Rev. Respir. Dis., 109:233-238 (1974)). Finally, adenovirus mediated gene transfer has been demonstrated in a number of instances including transfer of alpha-1-antitrypsin and CFTR to the lungs of cotton rats (Rosenfeld et al., Science, 252:431-434 (1991); Rosenfeld et al., Cell, 68:143-155 (1992)). Furthermore, extensive studies to attempt to establish adenovirus as a causative agent in human cancer were uniformly negative (Green et al. Proc. Natl. Acad. Sci. USA, 76:6606 (1979)).

[1021] Suitable adenoviral vectors useful in the present invention are described, for example, in Kozarsky and Wilson, Curr. Opin. Genet. Devel., 3:499-503 (1993); Rosenfeld et al., Cell , 68:143-155 (1992); Engelhardt et al., Human Genet. Ther., 4:759-769 (1993); Yang et al., Nature Genet., 7:362-369 (1994); Wilson et al., Nature ,365:691-692 (1993); and U.S. Pat. No. 5,652,224, which are herein incorporated by reference. For example, the adenovirus vector Ad2 is useful and can be grown in human 293 cells. These cells contain the E1 region of adenovirus and constitutively express E1a and E1b, which complement the defective adenoviruses by providing the products of the genes deleted from the vector. In addition to Ad2, other varieties of adenovirus (e.g., Ad3, Ad5, and Ad7) are also useful in the present invention.

[1022] Preferably, the adenoviruses used in the present invention are replication deficient. Replication deficient adenoviruses require the aid of a helper virus and/or packaging cell line to form infectious particles. The resulting virus is capable of infecting cells and can express a polynucleotide of interest which is operably linked to a promoter, but cannot replicate in most cells. Replication deficient adenoviruses may be deleted in one or more of all or a portion of the following genes: E1a, E1b, E3, E4, E2a, or L1 through L5.

[1023] In certain other embodiments, the cells are engineered, ex vivo or in vivo, using an adeno-associated virus (AAV). AAVs are naturally occurring defective viruses that require helper viruses to produce infectious particles (Muzyczka, Curr. Topics in Microbiol. Immunol., 158:97 (1992)). It is also one of the few viruses that may integrate its DNA into non-dividing cells. Vectors containing as little as 300 base pairs of AAV can be packaged and can integrate, but space for exogenous DNA is limited to about 4.5 kb. Methods for producing and using such AAVs are known in the art. See, for example, U.S. Pat. Nos. 5,139,941, 5,173,414, 5,354,678, 5,436,146, 5,474,935, 5,478,745, and 5,589,377.

[1024] For example, an appropriate AAV vector for use in the present invention will include all the sequences necessary for DNA replication, encapsidation, and host-cell integration. The polynucleotide construct containing polynucleotides of the invention is inserted into the AAV vector using standard cloning methods, such as those found in Sambrook et al., Molecular Cloning: A Laboratory Manual, Cold Spring Harbor Press (1989). The recombinant AAV vector is then transfected into packaging cells which are infected with a helper virus, using any standard technique, including lipofection, electroporation, calcium phosphate precipitation, etc. Appropriate helper viruses include adenoviruses, cytomegaloviruses., vaccinia viruses, or herpes viruses. Once the packaging cells are transfected and infected, they will produce infectious AAV viral particles which contain the polynucleotide construct of the invention. These viral particles are then used to transduce eukaryotic cells, either ex vivo or in vivo. The transduced cells will contain the polynucleotide construct integrated into its genome, and will express the desired gene product.

[1025] Another method of gene therapy involves operably associating heterologous control regions and endogenous polynucleotide sequences (e.g. encoding the polypeptide sequence of interest) via homologous recombination (see, e.g., U.S. Pat. No. 5,641,670, issued Jun. 24, 1997; International Publication NO: WO 96/29411, published Sep. 26, 1996; International Publication NO: WO 94/12650, published Aug. 4, 1994; Koller et al., Proc. Natl. Acad. Sci. USA, 86:8932-8935 (1989); and Zijlstra et al., Nature, 342:435-438 (1989). This method involves the activation of a gene which is present in the target cells, but which is not normally expressed in the cells, or is expressed at a lower level than desired.

[1026] Polynucleotide constructs are made, using standard techniques known in the art, which contain the promoter with targeting sequences flanking the promoter. Suitable promoters are described herein. The targeting sequence is sufficiently complementary to an endogenous sequence to permit homologous recombination of the promoter-targeting sequence with the endogenous sequence. The targeting sequence will be sufficiently near the 5′ end of the desired endogenous polynucleotide sequence so the promoter will be operably linked to the endogenous sequence upon homologous recombination.

[1027] The promoter and the targeting sequences can be amplified using PCR. Preferably, the amplified promoter contains distinct restriction enzyme sites on the 5′ and 3′ ends. Preferably, the 3′ end of the first targeting sequence contains the same restriction enzyme site as the 5′ end of the amplified promoter and the 5′ end of the second targeting sequence contains the same restriction site as the 3′ end of the amplified promoter. The amplified promoter and targeting sequences are digested and ligated together.

[1028] The promoter-targeting sequence construct is delivered to the cells, either as naked polynucleotide, or in conjunction with transfection-facilitating agents, such as liposomes, viral sequences, viral particles, whole viruses, lipofection, precipitating agents, etc., described in more detail above. The P promoter-targeting sequence can be delivered by any method, included direct needle injection, intravenous injection, topical administration, catheter infusion, particle accelerators, etc. The methods are described in more detail below.

[1029] The promoter-targeting sequence construct is taken up by cells. Homologous recombination between the construct and the endogenous sequence takes place, such that an endogenous sequence is placed under the control of the promoter. The promoter then drives the expression of the endogenous sequence.

[1030] The polynucleotides encoding polypeptides of the present invention may be administered along with other polynucleotides encoding angiogenic proteins. Angiogenic proteins include, but are not limited to, acidic and basic fibroblast growth factors, VEGF-1, VEGF-2 (VEGF-C), VEGF-3 (VEGF-B), epidermal growth factor alpha and beta, platelet-derived endothelial cell growth factor, platelet-derived growth factor, tumor necrosis factor alpha, hepatocyte growth factor, insulin like growth factor, colony stimulating factor, macrophage colony stimulating factor, granulocyte/macrophage colony stimulating factor, and nitric oxide synthase.

[1031] Preferably, the polynucleotide encoding a polypeptide of the invention contains a secretory signal sequence that facilitates secretion of the protein. Typically, the signal sequence is positioned in the coding region of the polynucleotide to be expressed towards or at the 5′ end of the coding region. The signal sequence may be homologous or heterologous to the polynucleotide of interest and may be homologous or heterologous to the cells to be transfected. Additionally, the signal sequence may be chemically synthesized using methods known in the art.

[1032] Any mode of administration of any of the above-described polynucleotides constructs can be used so long as the mode results in the expression of one or more molecules in an amount sufficient to provide a therapeutic effect. This includes direct needle injection, systemic injection, catheter infusion, biolistic injectors, particle accelerators (i.e., “gene guns”), gelfoam sponge depots, other commercially available depot materials, osmotic pumps (e.g., Alza minipumps), oral or suppositorial solid (tablet or pill) pharmaceutical formulations, and decanting or topical applications during surgery. For example, direct injection of naked calcium phosphate-precipitated plasmid into rat liver and rat spleen or a protein-coated plasmid into the portal vein has resulted in gene expression of the foreign gene in the rat livers. (Kaneda et al., Science, 243:375 (1989)).

[1033] A preferred method of local administration is by direct injection. Preferably, a recombinant molecule of the present invention complexed with a delivery vehicle is administered by direct injection into or locally within the area of arteries. Administration of a composition locally within the area of arteries refers to injecting the composition centimeters and preferably, millimeters within arteries.

[1034] Another method of local administration is to contact a polynucleotide construct of the present invention in or around a surgical wound. For example, a patient can undergo surgery and the polynucleotide construct can be coated on the surface of tissue inside the wound or the construct can be injected into areas of tissue inside the wound.

[1035] Therapeutic compositions useful in systemic administration, include recombinant molecules of the present invention complexed to a targeted delivery vehicle of the present invention. Suitable delivery vehicles for use with systemic administration comprise liposomes comprising ligands for targeting the vehicle to a particular site.

[1036] Preferred methods of systemic administration, include intravenous injection, aerosol, oral and percutaneous (topical) delivery. Intravenous injections can be performed using methods standard in the art. Aerosol delivery can also be performed using methods standard in the art (see, for example, Stribling et al., Proc. Natl. Acad. Sci. USA , 189:11277-11281 (1992), which is incorporated herein by reference). Oral delivery can be performed by complexing a polynucleotide construct of the present invention to a carrier capable of withstanding degradation by digestive enzymes in the gut of an animal. Examples of such carriers, include plastic capsules or tablets, such as those known in the art. Topical delivery can be performed by mixing a polynucleotide construct of the present invention with a lipophilic reagent (e.g., DMSO) that is capable of passing into the skin.

[1037] Determining an effective amount of substance to be delivered can depend upon a number of factors including, for example, the chemical structure and biological activity of the substance, the age and weight of the animal, the precise condition requiring treatment and its severity, and the route of administration. The frequency of treatments depends upon a number of factors, such as the amount of polynucleotide constructs administered per dose, as well as the health and history of the subject. The precise amount, number of doses, and timing of doses will be determined by the attending physician or veterinarian. Therapeutic compositions of the present invention can be administered to any animal, preferably to mammals and birds. Preferred mammals include humans, dogs, cats, mice, rats, rabbits sheep, cattle, horses and pigs, with humans being particularly preferred.

[1038] Biological Activities

[1039] The polynucleotides or polypeptides, or agonists or antagonists of the present invention can be used in assays to test for one or more biological activities. If these polynucleotides and polypeptides do exhibit activity in a particular assay, it is likely that these molecules may be involved in the diseases associated with the biological activity. Thus, the polynucleotides or polypeptides, or agonists or antagonists could be used to treat the associated disease.

[1040] Immune Activity

[1041] The polynucleotides or polypeptides, or agonists or antagonists of the present invention may be useful in treating, preventing, and/or diagnosing diseases, disorders, and/or conditions of the immune system, by activating or inhibiting the proliferation, differentiation, or mobilization (chemotaxis) of immune cells. Immune cells develop through a process called hematopoiesis, producing myeloid (platelets, red blood cells, neutrophils, and macrophages) and lymphoid (B and T lymphocytes) cells from pluripotent stem cells. The etiology of these immune diseases, disorders, and/or conditions may be genetic, somatic, such as cancer or some autoimmune diseases, disorders, and/or conditions, acquired (e.g., by chemotherapy or toxins), or infectious. Moreover, a polynucleotides or polypeptides, or agonists or antagonists of the present invention can be used as a marker or detector of a particular immune system disease or disorder.

[1042] A polynucleotides or polypeptides, or agonists or antagonists of the present invention may be useful in treating, preventing, and/or diagnosing diseases, disorders, and/or conditions of hematopoietic cells. A polynucleotides or polypeptides, or agonists or antagonists of the present invention could be used to increase differentiation and proliferation of hematopoietic cells, including the pluripotent stem cells, in an effort to treat or prevent those diseases, disorders, and/or conditions associated with a decrease in certain (or many) types hematopoietic cells. Examples of immunologic deficiency syndromes include, but are not limited to: blood protein diseases, disorders, and/or conditions (e.g. agammaglobulinemia, dysgammaglobulinemia), ataxia telangiectasia, common variable immunodeficiency, Digeorge Syndrome, HIV infection, HTLV-BLV infection, leukocyte adhesion deficiency syndrome, lymphopenia, phagocyte bactericidal dysfunction, severe combined immunodeficiency (SCIDs), Wiskott-Aldrich Disorder, anemia, thrombocytopenia, or hemoglobinuria.

[1043] Moreover, a polynucleotides or polypeptides, or agonists or antagonists of the present invention could also be used to modulate hemostatic (the stopping of bleeding) or thrombolytic activity (clot formation). For example, by increasing hemostatic or thrombolytic activity, a polynucleotides or polypeptides, or agonists or antagonists of the present invention could be used to treat or prevent blood coagulation diseases, disorders, and/or conditions (e.g., afibrinogenemia, factor deficiencies, arterial thrombosis, venous thrombosis, etc.), blood platelet diseases, disorders, and/or conditions (e.g. thrombocytopenia), or wounds resulting from trauma, surgery, or other causes. Alternatively, a polynucleotides or polypeptides, or agonists or antagonists of the present invention that can decrease hemostatic or thrombolytic activity could be used to inhibit or dissolve clotting. Polynucleotides or polypeptides, or agonists or antagonists of the present invention are may also be useful for the detection, prognosis, treatment, and/or prevention of heart attacks (infarction), strokes, scarring, fibrinolysis, uncontrolled bleeding, uncontrolled coagulation, uncontrolled complement fixation, and/or inflammation.

[1044] A polynucleotides or polypeptides, or agonists or antagonists of the present invention may also be useful in treating, preventing, and/or diagnosing autoimmune diseases, disorders, and/or conditions. Many autoimmune diseases, disorders, and/or conditions result from inappropriate recognition of self as foreign material by immune cells. This inappropriate recognition results in an immune response leading to the destruction of the host tissue. Therefore, the administration of a polynucleotides or polypeptides, or agonists or antagonists of the present invention that inhibits an immune response, particularly the proliferation, differentiation, or chemotaxis of T-cells, may be an effective therapy in preventing autoimmune diseases, disorders, and/or conditions.

[1045] Examples of autoimmune diseases, disorders, and/or conditions that can be treated, prevented, and/or diagnosed or detected by the present invention include, but are not limited to: Addison's Disease, hemolytic anemia, antiphospholipid syndrome, rheumatoid arthritis, dermatitis, allergic encephalomyelitis, glomerulonephritis, Goodpasture's Syndrome, Graves' Disease, Multiple Sclerosis, Myasthenia Gravis, Neuritis, Ophthalmia, Bullous Pemphigoid, Pemphigus, Polyendocrinopathies, Purpura, Reiter's Disease, Stiff-Man Syndrome, Autoimmune Thyroiditis, Systemic Lupus Erythematosus, Autoimmune Pulmonary Inflammation, Guillain-Barre Syndrome, insulin dependent diabetes mellitis, and autoimmune inflammatory eye disease.

[1046] Similarly, allergic reactions and conditions, such as asthma (particularly allergic asthma) or other respiratory problems, may also be treated, prevented, and/or diagnosed by polynucleotides or polypeptides, or agonists or antagonists of the present invention. Moreover, these molecules can be used to treat anaphylaxis, hypersensitivity to an antigenic molecule, or blood group incompatibility.

[1047] A polynucleotides or polypeptides, or agonists or antagonists of the present invention may also be used to treat, prevent, and/or diagnose organ rejection or graft-versus-host disease (GVHD). Organ rejection occurs by host immune cell destruction of the transplanted tissue through an immune response. Similarly, an immune response is also involved in GVHD, but, in this case, the foreign transplanted immune cells destroy the host tissues. The administration of a polynucleotides or polypeptides, or agonists or antagonists of the present invention that inhibits an immune response, particularly the proliferation, differentiation, or chemotaxis of T-cells, may be an effective therapy in preventing organ rejection or GVHD.

[1048] Similarly, a polynucleotides or polypeptides, or agonists or antagonists of the present invention may also be used to modulate inflammation. For example, the polypeptide or polynucleotide or agonists or antagonist may inhibit the proliferation and differentiation of cells involved in an inflammatory response. These molecules can be used to treat, prevent, and/or diagnose inflammatory conditions, both chronic and acute conditions, including chronic prostatitis, granulomatous prostatitis and malacoplakia, inflammation associated with infection (e.g., septic shock, sepsis, or systemic inflammatory response syndrome (SIRS)), ischemia-reperfusion injury, endotoxin lethality, arthritis, complement-mediated hyperacute rejection, nephritis, cytokine or chemokine induced lung injury, inflammatory bowel disease, Crohn's disease, or resulting from over production of cytokines (e.g., TNF or IL-1.)

[1049] Hyperproliferative Disorders

[1050] A polynucleotides or polypeptides, or agonists or antagonists of the invention can be used to treat, prevent, and/or diagnose hyperproliferative diseases, disorders, and/or conditions, including neoplasms. A polynucleotides or polypeptides, or agonists or antagonists of the present invention may inhibit the proliferation of the disorder through direct or indirect interactions. Alternatively, a polynucleotides or polypeptides, or agonists or antagonists of the present invention may proliferate other cells which can inhibit the hyperproliferative disorder.

[1051] For example, by increasing an immune response, particularly increasing antigenic qualities of the hyperproliferative disorder or by proliferating, differentiating, or mobilizing T-cells, hyperproliferative diseases, disorders, and/or conditions can be treated, prevented, and/or diagnosed. This immune response may be increased by either enhancing an existing immune response, or by initiating a new immune response. Alternatively, decreasing an immune response may also be a method of treating, preventing, and/or diagnosing hyperproliferative diseases, disorders, and/or conditions, such as a chemotherapeutic agent.

[1052] Examples of hyperproliferative diseases, disorders, and/or conditions that can be treated, prevented, and/or diagnosed by polynucleotides or polypeptides, or agonists or antagonists of the present invention include, but are not limited to neoplasms located in the: colon, abdomen, bone, breast, digestive system, liver, pancreas, peritoneum, endocrine glands (adrenal, parathyroid, pituitary, testicles, ovary, thymus, thyroid), eye, head and neck, nervous (central and peripheral), lymphatic system, pelvic, skin, soft tissue, spleen, thoracic, and urogenital.

[1053] Similarly, other hyperproliferative diseases, disorders, and/or conditions can also be treated, prevented, and/or diagnosed by a polynucleotides or polypeptides, or agonists or antagonists of the present invention. Examples of such hyperproliferative diseases, disorders, and/or conditions include, but are not limited to: hypergammaglobulinemia, lymphoproliferative diseases, disorders, and/or conditions, paraproteinemias, purpura, sarcoidosis, Sezary Syndrome, Waldenstron's Macroglobulinemia, Gaucher's Disease, histiocytosis, and any other hyperproliferative disease, besides neoplasia, located in an organ system listed above.

[1054] One preferred embodiment utilizes polynucleotides of the present invention to inhibit aberrant cellular division, by gene therapy using the present invention, and/or protein fusions or fragments thereof.

[1055] Thus, the present invention provides a method for treating or preventing cell proliferative diseases, disorders, and/or conditions by inserting into an abnormally proliferating cell a polynucleotide of the present invention, wherein said polynucleotide represses said expression.

[1056] Another embodiment of the present invention provides a method of treating or preventing cell-proliferative diseases, disorders, and/or conditions in individuals comprising administration of one or more active gene copies of the present invention to an abnormally proliferating cell or cells. In a preferred embodiment, polynucleotides of the present invention is a DNA construct comprising a recombinant expression vector effective in expressing a DNA sequence encoding said polynucleotides. In another preferred embodiment of the present invention, the DNA construct encoding the polynucleotides of the present invention is inserted into cells to be treated utilizing a retrovirus, or more Preferably an adenoviral vector (See G J. Nabel, et. al., PNAS 1999 96: 324-326, which is hereby incorporated by reference). In a most preferred embodiment, the viral vector is defective and will not transform non-proliferating cells, only proliferating cells. Moreover, in a preferred embodiment, the polynucleotides of the present invention inserted into proliferating cells either alone, or in combination with or fused to other polynucleotides, can then be modulated via an external stimulus (i.e. magnetic, specific small molecule, chemical, or drug administration, etc.), which acts upon the promoter upstream of said polynucleotides to induce expression of the encoded protein product. As such the beneficial therapeutic affect of the present invention may be expressly modulated (i.e. to increase, decrease, or inhibit expression of the present invention) based upon said external stimulus.

[1057] Polynucleotides of the present invention may be useful in repressing expression of oncogenic genes or antigens. By “repressing expression of the oncogenic genes” is intended the suppression of the transcription of the gene, the degradation of the gene transcript (pre-message RNA), the inhibition of splicing, the destruction of the messenger RNA, the prevention of the post-translational modifications of the protein, the destruction of the protein, or the inhibition of the normal function of the protein.

[1058] For local administration to abnormally proliferating cells, polynucleotides of the present invention may be administered by any method known to those of skill in the art including, but not limited to transfection, electroporation, microinjection of cells, or in vehicles such as liposomes, lipofectin, or as naked polynucleotides, or any other method described throughout the specification. The polynucleotide of the present invention may be delivered by known gene delivery systems such as, but not limited to, retroviral vectors (Gilboa, J. Virology 44:845 (1982); Hocke, Nature 320:275 (1986); Wilson, et al., Proc. Natl. Acad. Sci. U.S.A. 85:3014), vaccinia virus system (Chakrabarty et al., Mol. Cell Biol. 5:3403 (1985) or other efficient DNA delivery systems (Yates et al., Nature 313:812 (1985)) known to those skilled in the art. These references are exemplary only and are hereby incorporated by reference. In order to specifically deliver or transfect cells which are abnormally proliferating and spare non-dividing cells, it is preferable to utilize a retrovirus, or adenoviral (as described in the art and elsewhere herein) delivery system known to those of skill in the art. Since host DNA replication is required for retroviral DNA to integrate and the retrovirus will be unable to self replicate due to the lack of the retrovirus genes needed for its life cycle. Utilizing such a retroviral delivery system for polynucleotides of the present invention will target said gene and constructs to abnormally proliferating cells and will spare the non-dividing normal cells.

[1059] The polynucleotides of the present invention may be delivered directly to cell proliferative disorder/disease sites in internal organs, body cavities and the like by use of imaging devices used to guide an injecting needle directly to the disease site. The polynucleotides of the present invention may also be administered to disease sites at the time of surgical intervention.

[1060] By “cell proliferative disease” is meant any human or animal disease or disorder, affecting any one or any combination of organs, cavities, or body parts, which is characterized by single or multiple local abnormal proliferations of cells, groups of cells, or tissues, whether benign or malignant.

[1061] Any amount of the polynucleotides of the present invention may be administered as long as it has a biologically inhibiting effect on the proliferation of the treated cells. Moreover, it is possible to administer more than one of the polynucleotide of the present invention simultaneously to the same site. By “biologically inhibiting” is meant partial or total growth inhibition as well as decreases in the rate of proliferation or growth of the cells. The biologically inhibitory dose may be determined by assessing the effects of the polynucleotides of the present invention on target malignant or abnormally proliferating cell growth in tissue culture, tumor growth in animals and cell cultures, or any other method known to one of ordinary skill in the art.

[1062] The present invention is further directed to antibody-based therapies which involve administering of anti-polypeptides and anti-polynucleotide antibodies to a mammalian, preferably human, patient for treating, preventing, and/or diagnosing one or more of the described diseases, disorders, and/or conditions. Methods for producing anti-polypeptides and anti-polynucleotide antibodies polyclonal and monoclonal antibodies are described in detail elsewhere herein. Such antibodies may be provided in pharmaceutically acceptable compositions as known in the art or as described herein.

[1063] A summary of the ways in which the antibodies of the present invention may be used therapeutically includes binding polynucleotides or polypeptides of the present invention locally or systemically in the body or by direct cytotoxicity of the antibody, e.g. as mediated by complement (CDC) or by effector cells (ADCC). Some of these approaches are described in more detail below. Armed with the teachings provided herein, one of ordinary skill in the art will know how to use the antibodies of the present invention for diagnostic, monitoring or therapeutic purposes without undue experimentation.

[1064] In particular, the antibodies, fragments and derivatives of the present invention are useful for treating, preventing, and/or diagnosing a subject having or developing cell proliferative and/or differentiation diseases, disorders, and/or conditions as described herein. Such treatment comprises administering a single or multiple doses of the antibody, or a fragment, derivative, or a conjugate thereof.

[1065] The antibodies of this invention may be advantageously utilized in combination with other monoclonal or chimeric antibodies, or with lymphokines or hematopoietic growth factors, for example, which serve to increase the number or activity of effector cells which interact with the antibodies.

[1066] It is preferred to use high affinity and/or potent in vivo inhibiting and/or neutralizing antibodies against polypeptides or polynucleotides of the present invention, fragments or regions thereof, for both immunoassays directed to and therapy of diseases, disorders, and/or conditions related to polynucleotides or polypeptides, including fragments thereof, of the present invention. Such antibodies, fragments, or regions, will preferably have an affinity for polynucleotides or polypeptides, including fragments thereof. Preferred binding affinities include those with a dissociation constant or Kd less than 5×10-6M, 10-6M, 5×10-7M, 10-7M, 5×10-8M, 10-8M, 5×10-9M, 10-9M, 5×10-10M, 10-10M, 5×10-11M, 10-11M, 5×10-12M, 10-12M, 5×10-13M, 10-13M, 5×10-14M, 10-14M, 5×10-15M, and 10-15M.

[1067] Moreover, polypeptides of the present invention may be useful in inhibiting the angiogenesis of proliferative cells or tissues, either alone, as a protein fusion, or in combination with other polypeptides directly or indirectly, as described elsewhere herein. In a most preferred embodiment, said anti-angiogenesis effect may be achieved indirectly, for example, through the inhibition of hematopoietic, tumor-specific cells, such as tumor-associated macrophages (See Joseph IB, et al. J Natl Cancer Inst, 90(21):1648-53 (1998), which is hereby incorporated by reference). Antibodies directed to polypeptides or polynucleotides of the present invention may also result in inhibition of angiogenesis directly, or indirectly (See Witte L, et al., Cancer Metastasis Rev. 17(2):155-61 (1998), which is hereby incorporated by reference)).

[1068] Polypeptides, including protein fusions, of the present invention, or fragments thereof may be useful in inhibiting proliferative cells or tissues through the induction of apoptosis. Said polypeptides may act either directly, or indirectly to induce apoptosis of proliferative cells and tissues, for example in the activation of a death-domain receptor, such as tumor necrosis factor (TNF) receptor-1, CD95 (Fas/APO-1), TNF-receptor-related apoptosis-mediated protein (TRAMP) and TNF-related apoptosis-inducing ligand (TRAIL) receptor-1 and -2 (See Schulze-Osthoff K, et al., Eur J Biochem 254(3):439-59 (1998), which is hereby incorporated by reference). Moreover, in another preferred embodiment of the present invention, said polypeptides may induce apoptosis through other mechanisms, such as in the activation of other proteins which will activate apoptosis, or through stimulating the expression of said proteins, either alone or in combination with small molecule drugs or adjuvants, such as apoptonin, galectins, thioredoxins, antiinflammatory proteins (See for example, Mutat. Res. 400(1-2):447-55 (1998), Med Hypotheses.50(5):423-33 (1998), Chem. Biol. Interact. April 24;111-112:23-34 (1998), J Mol Med.76(6):402-12 (1998), Int. J. Tissue React. 20(1):3-15 (1998), which are all hereby incorporated by reference).

[1069] Polypeptides, including protein fusions to, or fragments thereof, of the present invention are useful in inhibiting the metastasis of proliferative cells or tissues. Inhibition may occur as a direct result of administering polypeptides, or antibodies directed to said polypeptides as described elsewhere herein, or indirectly, such as activating the expression of proteins known to inhibit metastasis, for example alpha 4 integrins, (See, e.g., Curr Top Microbiol Immunol 1998;231:125-41, which is hereby incorporated by reference). Such therapeutic affects of the present invention may be achieved either alone, or in combination with small molecule drugs or adjuvants.

[1070] In another embodiment, the invention provides a method of delivering compositions containing the polypeptides of the invention (e.g., compositions containing polypeptides or polypeptide antibodies associated with heterologous polypeptides, heterologous nucleic acids, toxins, or prodrugs) to targeted cells expressing the polypeptide of the present invention. Polypeptides or polypeptide antibodies of the invention may be associated with heterologous polypeptides, heterologous nucleic acids, toxins, or prodrugs via hydrophobic, hydrophilic, ionic and/or covalent interactions.

[1071] Polypeptides, protein fusions to, or fragments thereof, of the present invention are useful in enhancing the immunogenicity and/or antigenicity of proliferating cells or tissues, either directly, such as would occur if the polypeptides of the present invention ‘vaccinated’ the immune response to respond to proliferative antigens and immunogens, or indirectly, such as in activating the expression of proteins known to enhance the immune response (e.g. chemokines), to said antigens and immunogens.

[1072] Cardiovascular Disorders

[1073] Polynucleotides or polypeptides, or agonists or antagonists of the invention may be used to treat, prevent, and/or diagnose cardiovascular diseases, disorders, and/or conditions, including peripheral artery disease, such as limb ischemia.

[1074] Cardiovascular diseases, disorders, and/or conditions include cardiovascular abnormalities, such as arterio-arterial fistula, arteriovenous fistula, cerebral arteriovenous malformations, congenital heart defects, pulmonary atresia, and Scimitar Syndrome. Congenital heart defects include aortic coarctation, cor triatriatum, coronary vessel anomalies, crisscross heart, dextrocardia, patent ductus arteriosus, Ebstein's anomaly, Eisenmenger complex, hypoplastic left heart syndrome, levocardia, tetralogy of fallot, transposition of great vessels, double outlet right ventricle, tricuspid atresia, persistent truncus arteriosus, and heart septal defects, such as aortopulmonary septal defect, endocardial cushion defects, Lutembacher's Syndrome, trilogy of Fallot, ventricular heart septal defects.

[1075] Cardiovascular diseases, disorders, and/or conditions also include heart disease, such as arrhythmias, carcinoid heart disease, high cardiac output, low cardiac output, cardiac tamponade, endocarditis (including bacterial), heart aneurysm, cardiac arrest, congestive heart failure, congestive cardiomyopathy, paroxysmal dyspnea, cardiac edema, heart hypertrophy, congestive cardiomyopathy, left ventricular hypertrophy, right ventricular hypertrophy, post-infarction heart rupture, ventricular septal rupture, heart valve diseases, myocardial diseases, myocardial ischemia, pericardial effusion, pericarditis (including constrictive and tuberculous), pneumopericardium, postpericardiotomy syndrome, pulmonary heart disease, rheumatic heart disease, ventricular dysfunction, hyperemia, cardiovascular pregnancy complications, Scimitar Syndrome, cardiovascular syphilis, and cardiovascular tuberculosis.

[1076] Arrhythmias include sinus arrhythmia, atrial fibrillation, atrial flutter, bradycardia, extrasystole, Adams-Stokes Syndrome, bundle-branch block, sinoatrial block, long QT syndrome, parasystole, Lown-Ganong-Levine Syndrome, Mahaim-type pre-excitation syndrome, Wolff-Parkinson-White syndrome, sick sinus syndrome, tachycardias, and ventricular fibrillation. Tachycardias include paroxysmal tachycardia, supraventricular tachycardia, accelerated idioventricular rhythm, atrioventricular nodal reentry tachycardia, ectopic atrial tachycardia, ectopic junctional tachycardia, sinoatrial nodal reentry tachycardia, sinus tachycardia, Torsades de Pointes, and ventricular tachycardia.

[1077] Heart valve disease include aortic valve insufficiency, aortic valve stenosis, hear murmurs, aortic valve prolapse, mitral valve prolapse, tricuspid valve prolapse, mitral valve insufficiency, mitral valve stenosis, pulmonary atresia, pulmonary valve insufficiency, pulmonary valve stenosis, tricuspid atresia, tricuspid valve insufficiency, and tricuspid valve stenosis.

[1078] Myocardial diseases include alcoholic cardiomyopathy, congestive cardiomyopathy, hypertrophic cardiomyopathy, aortic subvalvular stenosis, pulmonary subvalvular stenosis, restrictive cardiomyopathy, Chagas cardiomyopathy, endocardial fibroelastosis, endomyocardial fibrosis, Kearns Syndrome, myocardial reperfusion injury, and myocarditis.

[1079] Myocardial ischemias include coronary disease, such as angina pectoris, coronary aneurysm, coronary arteriosclerosis, coronary thrombosis, coronary vasospasm, myocardial infarction and myocardial stunning.

[1080] Cardiovascular diseases also include vascular diseases such as aneurysms, angiodysplasia, angiomatosis, bacillary angiomatosis, Hippel-Lindau Disease, Klippel-Trenaunay-Weber Syndrome, Sturge-Weber Syndrome, angioneurotic edema, aortic diseases, Takayasu's Arteritis, aortitis, Leriche's Syndrome, arterial occlusive diseases, arteritis, enarteritis, polyarteritis nodosa, cerebrovascular diseases, disorders, and/or conditions, diabetic angiopathies, diabetic retinopathy, embolisms, thrombosis, erythromelalgia, hemorrhoids, hepatic veno-occlusive disease, hypertension, hypotension, ischemia, peripheral vascular diseases, phlebitis, pulmonary veno-occlusive disease, Raynaud's disease, CREST syndrome, retinal vein occlusion, Scimitar syndrome, superior vena cava syndrome, telangiectasia, atacia telangiectasia, hereditary hemorrhagic telangiectasia, varicocele, varicose veins, varicose ulcer, vasculitis, and venous insufficiency.

[1081] Aneurysms include dissecting aneurysms, false aneurysms, infected aneurysms, ruptured aneurysms, aortic aneurysms, cerebral aneurysms, coronary aneurysms, heart aneurysms, and iliac aneurysms.

[1082] Arterial occlusive diseases include arteriosclerosis, intermittent claudication, carotid stenosis, fibromuscular dysplasias, mesenteric vascular occlusion, Moyamoya disease, renal artery obstruction, retinal artery occlusion, and thromboangiitis obliterans.

[1083] Cerebrovascular diseases, disorders, and/or conditions include carotid artery diseases, cerebral amyloid angiopathy, cerebral aneurysm, cerebral anoxia, cerebral arteriosclerosis, cerebral arteriovenous malformation, cerebral artery diseases, cerebral embolism and thrombosis, carotid artery thrombosis, sinus thrombosis, Wallenberg's syndrome, cerebral hemorrhage, epidural hematoma, subdural hematoma, subaraxhnoid hemorrhage, cerebral infarction, cerebral ischemia (including transient), subclavian steal syndrome, periventricular leukomalacia, vascular headache, cluster headache, migraine, and vertebrobasilar insufficiency.

[1084] Embolisms include air embolisms, amniotic fluid embolisms, cholesterol embolisms, blue toe syndrome, fat embolisms, pulmonary embolisms, and thromoboembolisms. Thrombosis include coronary thrombosis, hepatic vein thrombosis, retinal vein occlusion, carotid artery thrombosis, sinus thrombosis, Wallenberg's syndrome, and thrombophlebitis.

[1085] Ischemia includes cerebral ischemia, ischemic colitis, compartment syndromes, anterior compartment syndrome, myocardial ischemia, reperfusion injuries, and peripheral limb ischemia. Vasculitis includes aortitis, arteritis, Behcet's Syndrome, Churg-Strauss Syndrome, mucocutaneous lymph node syndrome, thromboangiitis obliterans, hypersensitivity vasculitis, Schoenlein-Henoch purpura, allergic cutaneous vasculitis, and Wegener's granulomatosis.

[1086] Polynucleotides or polypeptides, or agonists or antagonists of the invention, are especially effective for the treatment of critical limb ischemia and coronary disease.

[1087] Polypeptides may be administered using any method known in the art, including, but not limited to, direct needle injection at the delivery site, intravenous injection, topical administration, catheter infusion, biolistic injectors, particle accelerators, gelfoam sponge depots, other commercially available depot materials, osmotic pumps, oral or suppositorial solid pharmaceutical formulations, decanting or topical applications during surgery, aerosol delivery. Such methods are known in the art. Polypeptides of the invention may be administered as part of a Therapeutic, described in more detail below. Methods of delivering polynucleotides of the invention are described in more detail herein.

[1088] Anti-Angiogenesis Activity

[1089] The naturally occurring balance between endogenous stimulators and inhibitors of angiogenesis is one in which inhibitory influences predominate. Rastinejad et al., Cell 56:345-355 (1989). In those rare instances in which neovascularization occurs under normal physiological conditions, such as wound healing, organ regeneration, embryonic development, and female reproductive processes, angiogenesis is stringently regulated and spatially and temporally delimited. Under conditions of pathological angiogenesis such as that characterizing solid tumor growth, these regulatory controls fail. Unregulated angiogenesis becomes pathologic and sustains progression of many neoplastic and non-neoplastic diseases. A number of serious diseases are dominated by abnormal neovascularization including solid tumor growth and metastases, arthritis, some types of eye diseases, disorders, and/or conditions, and psoriasis. See, e.g., reviews by Moses et al., Biotech. 9:630-634 (1991); Folkman et al., N. Engl. J. Med., 333:1757-1763 (1995); Auerbach et al., J. Microvasc. Res. 29:401-411 (1985); Folkman, Advances in Cancer Research, eds. Klein and Weinhouse, Academic Press, New York, pp. 175-203 (1985); Patz, Am. J. Opthalmol. 94:715-743 (1982); and Folkman et al., Science 221:719-725 (1983). In a number of pathological conditions, the process of angiogenesis contributes to the disease state. For example, significant data have accumulated which suggest that the growth of solid tumors is dependent on angiogenesis. Folkman and Klagsbrun, Science 235:442-447 (1987).

[1090] The present invention provides for treatment of diseases, disorders, and/or conditions associated with neovascularization by administration of the polynucleotides and/or polypeptides of the invention, as well as agonists or antagonists of the present invention. Malignant and metastatic conditions which can be treated with the polynucleotides and polypeptides, or agonists or antagonists of the invention include, but are not limited to, malignancies, solid tumors, and cancers described herein and otherwise known in the art (for a review of such disorders, see Fishman et al., Medicine, 2d Ed., J. B. Lippincott Co., Philadelphia (1985)).Thus, the present invention provides a method of treating, preventing, and/or diagnosing an angiogenesis-related disease and/or disorder, comprising administering to an individual in need thereof a therapeutically effective amount of a polynucleotide, polypeptide, antagonist and/or agonist of the invention. For example, polynucleotides, polypeptides, antagonists and/or agonists may be utilized in a variety of additional methods in order to therapeutically treat or prevent a cancer or tumor. Cancers which may be treated, prevented, and/or diagnosed with polynucleotides, polypeptides, antagonists and/or agonists include, but are not limited to solid tumors, including prostate, lung, breast, ovarian, stomach, pancreas, larynx, esophagus, testes, liver, parotid, biliary tract, colon, rectum, cervix, uterus, endometrium, kidney, bladder, thyroid cancer; primary tumors and metastases; melanomas; glioblastoma; Kaposi's sarcoma; leiomyosarcoma; non-small cell lung cancer; colorectal cancer; advanced malignancies; and blood born tumors such as leukemias. For example, polynucleotides, polypeptides, antagonists and/or agonists may be delivered topically, in order to treat or prevent cancers such as skin cancer, head and neck tumors, breast tumors, and Kaposi's sarcoma.

[1091] Within yet other aspects, polynucleotides, polypeptides, antagonists and/or agonists may be utilized to treat superficial forms of bladder cancer by, for example, intravesical administration. Polynucleotides, polypeptides, antagonists and/or agonists may be delivered directly into the tumor, or near the tumor site, via injection or a catheter. Of course, as the artisan of ordinary skill will appreciate, the appropriate mode of administration will vary according to the cancer to be treated. Other modes of delivery are discussed herein.

[1092] Polynucleotides, polypeptides, antagonists and/or agonists may be useful in treating, preventing, and/or diagnosing other diseases, disorders, and/or conditions, besides cancers, which involve angiogenesis. These diseases, disorders, and/or conditions include, but are not limited to: benign tumors, for example hemangiomas, acoustic neuromas, neurofibromas, trachomas, and pyogenic granulomas; artheroscleric plaques; ocular angiogenic diseases, for example, diabetic retinopathy, retinopathy of prematurity, macular degeneration, corneal graft rejection, neovascular glaucoma, retrolental fibroplasia, rubeosis, retinoblastoma, uvietis and Pterygia (abnormal blood vessel growth) of the eye; rheumatoid arthritis; psoriasis; delayed wound healing; endometriosis; vasculogenesis; granulations; hypertrophic scars (keloids); nonunion fractures; scleroderma; trachoma; vascular adhesions; myocardial angiogenesis; coronary collaterals; cerebral collaterals; arteriovenous malformations; ischemic limb angiogenesis; Osler-Webber Syndrome; plaque neovascularization; telangiectasia; hemophiliac joints; angiofibroma; fibromuscular dysplasia; wound granulation; Crohn's disease; and atherosclerosis.

[1093] For example, within one aspect of the present invention methods are provided for treating, preventing, and/or diagnosing hypertrophic scars and keloids, comprising the step of administering a polynucleotide, polypeptide, antagonist and/or agonist of the invention to a hypertrophic scar or keloid.

[1094] Within one embodiment of the present invention polynucleotides, polypeptides, antagonists and/or agonists are directly injected into a hypertrophic scar or keloid, in order to prevent the progression of these lesions. This therapy is of particular value in the prophylactic treatment of conditions which are known to result in the development of hypertrophic scars and keloids (e.g., burns), and is preferably initiated after the proliferative phase has had time to progress (approximately 14 days after the initial injury), but before hypertrophic scar or keloid development. As noted above, the present invention also provides methods for treating, preventing, and/or diagnosing neovascular diseases of the eye, including for example, corneal neovascularization, neovascular glaucoma, proliferative diabetic retinopathy, retrolental fibroplasia and macular degeneration.

[1095] Moreover, Ocular diseases, disorders, and/or conditions associated with neovascularization which can be treated, prevented, and/or diagnosed with the polynucleotides and polypeptides of the present invention (including agonists and/or antagonists) include, but are not limited to: neovascular glaucoma, diabetic retinopathy, retinoblastoma, retrolental fibroplasia, uveitis, retinopathy of prematurity macular degeneration, corneal graft neovascularization, as well as other eye inflammatory diseases, ocular tumors and diseases associated with choroidal or iris neovascularization. See, e.g., reviews by Waltman et al., Am. J. Ophthal. 85:704-710 (1978) and Gartner et al., Surv. Ophthal. 22:291-312 (1978).

[1096] Thus, within one aspect of the present invention methods are provided for treating or preventing neovascular diseases of the eye such as corneal neovascularization (including corneal graft neovascularization), comprising the step of administering to a patient a therapeutically effective amount of a compound (as described above) to the cornea, such that the formation of blood vessels is inhibited. Briefly, the cornea is a tissue which normally lacks blood vessels. In certain pathological conditions however, capillaries may extend into the cornea from the pericorneal vascular plexus of the limbus. When the cornea becomes vascularized, it also becomes clouded, resulting in a decline in the patient's visual acuity. Visual loss may become complete if the cornea completely opacitates. A wide variety of diseases, disorders, and/or conditions can result in corneal neovascularization, including for example, corneal infections (e.g., trachoma, herpes simplex keratitis, leishmaniasis and onchocerciasis), immunological processes (e.g., graft rejection and Stevens-Johnson's syndrome), alkali burns, trauma, inflammation (of any cause), toxic and nutritional deficiency states, and as a complication of wearing contact lenses.

[1097] Within particularly preferred embodiments of the invention, may be prepared for topical administration in saline (combined with any of the preservatives and antimicrobial agents commonly used in ocular preparations), and administered in eyedrop form. The solution or suspension may be prepared in its pure form and administered several times daily. Alternatively, anti-angiogenic compositions, prepared as described above, may also be administered directly to the cornea. Within preferred embodiments, the anti-angiogenic composition is prepared with a muco-adhesive polymer which binds to cornea. Within further embodiments, the anti-angiogenic factors or anti-angiogenic compositions may be utilized as an adjunct to conventional steroid therapy. Topical therapy may also be useful prophylactically in corneal lesions which are known to have a high probability of inducing an angiogenic response (such as chemical burns). In these instances the treatment, likely in combination with steroids, may be instituted immediately to help prevent subsequent complications.

[1098] Within other embodiments, the compounds described above may be injected directly into the corneal stroma by an ophthalmologist under microscopic guidance. The preferred site of injection may vary with the morphology of the individual lesion, but the goal of the administration would be to place the composition at the advancing front of the vasculature (i.e., interspersed between the blood vessels and the normal cornea). In most cases this would involve perilimbic corneal injection to “protect” the cornea from the advancing blood vessels. This method may also be utilized shortly after a corneal insult in order to prophylactically prevent corneal neovascularization. In this situation the material could be injected in the perilimbic cornea interspersed between the corneal lesion and its undesired potential limbic blood supply. Such methods may also be utilized in a similar fashion to prevent capillary invasion of transplanted corneas. In a sustained-release form injections might only be required 2-3 times per year. A steroid could also be added to the injection solution to reduce inflammation resulting from the injection itself.

[1099] Within another aspect of the present invention, methods are provided for treating or preventing neovascular glaucoma, comprising the step of administering to a patient a therapeutically effective amount of a polynucleotide, polypeptide, antagonist and/or agonist to the eye, such that the formation of blood vessels is inhibited. In one embodiment, the compound may be administered topically to the eye in order to treat or prevent early forms of neovascular glaucoma. Within other embodiments, the compound may be implanted by injection into the region of the anterior chamber angle. Within other embodiments, the compound may also be placed in any location such that the compound is continuously released into the aqueous humor. Within another aspect of the present invention, methods are provided for treating or preventing proliferative diabetic retinopathy, comprising the step of administering to a patient a therapeutically effective amount of a polynucleotide, polypeptide, antagonist and/or agonist to the eyes, such that the formation of blood vessels is inhibited.

[1100] Within particularly preferred embodiments of the invention, proliferative diabetic retinopathy may be treated by injection into the aqueous humor or the vitreous, in order to increase the local concentration of the polynucleotide, polypeptide, antagonist and/or agonist in the retina. Preferably, this treatment should be initiated prior to the acquisition of severe disease requiring photocoagulation.

[1101] Within another aspect of the present invention, methods are provided for treating or preventing retrolental fibroplasia, comprising the step of administering to a patient a therapeutically effective amount of a polynucleotide, polypeptide, antagonist and/or agonist to the eye, such that the formation of blood vessels is inhibited. The compound may be administered topically, via intravitreous injection and/or via intraocular implants.

[1102] Additionally, diseases, disorders, and/or conditions which can be treated, prevented, and/or diagnosed with the polynucleotides, polypeptides, agonists and/or agonists include, but are not limited to, hemangioma, arthritis, psoriasis, angiofibroma, atherosclerotic plaques, delayed wound healing, granulations, hemophilic joints, hypertrophic scars, nonunion fractures, Osler-Weber syndrome, pyogenic granuloma, scleroderma, trachoma, and vascular adhesions.

[1103] Moreover, diseases, disorders, and/or conditions and/or states, which can be treated, prevented, and/or diagnosed with the polynucleotides, polypeptides, agonists and/or agonists include, but are not limited to, solid tumors, blood born tumors such as leukemias, tumor metastasis, Kaposi's sarcoma, benign tumors, for example hemangiomas, acoustic neuromas, neurofibromas, trachomas, and pyogenic granulomas, rheumatoid arthritis, psoriasis, ocular angiogenic diseases, for example, diabetic retinopathy, retinopathy of prematurity, macular degeneration, corneal graft rejection, neovascular glaucoma, retrolental fibroplasia, rubeosis, retinoblastoma, and uvietis, delayed wound healing, endometriosis, vascluogenesis, granulations, hypertrophic scars (keloids), nonunion fractures, scleroderma, trachoma, vascular adhesions, myocardial angiogenesis, coronary collaterals, cerebral collaterals, arteriovenous malformations, ischemic limb angiogenesis, Osler-Webber Syndrome, plaque neovascularization, telangiectasia, hemophiliac joints, angiofibroma fibromuscular dysplasia, wound granulation, Crohn's disease, atherosclerosis, birth control agent by preventing vascularization required for embryo implantation controlling menstruation, diseases that have angiogenesis as a pathologic consequence such as cat scratch disease (Rochele minalia quintosa), ulcers (Helicobacter pylori), Bartonellosis and bacillary angiomatosis.

[1104] In one aspect of the birth control method, an amount of the compound sufficient to block embryo implantation is administered before or after intercourse and fertilization have occurred, thus providing an effective method of birth control, possibly a “morning after” method. Polynucleotides, polypeptides, agonists and/or agonists may also be used in controlling menstruation or administered as either a peritoneal lavage fluid or for peritoneal implantation in the treatment of endometriosis.

[1105] Polynucleotides, polypeptides, agonists and/or agonists of the present invention may be incorporated into surgical sutures in order to prevent stitch granulomas.

[1106] Polynucleotides, polypeptides, agonists and/or agonists may be utilized in a wide variety of surgical procedures. For example, within one aspect of the present invention a compositions (in the form of, for example, a spray or film) may be utilized to coat or spray an area prior to removal of a tumor, in order to isolate normal surrounding tissues from malignant tissue, and/or to prevent the spread of disease to surrounding tissues. Within other aspects of the present invention, compositions (e.g., in the form of a spray) may be delivered via endoscopic procedures in order to coat tumors, or inhibit angiogenesis in a desired locale. Within yet other aspects of the present invention, surgical meshes which have been coated with anti-angiogenic compositions of the present invention may be utilized in any procedure wherein a surgical mesh might be utilized. For example, within one embodiment of the invention a surgical mesh laden with an anti-angiogenic composition may be utilized during abdominal cancer resection surgery (e.g., subsequent to colon resection) in order to provide support to the structure, and to release an amount of the anti-angiogenic factor.

[1107] Within further aspects of the present invention, methods are provided for treating tumor excision sites, comprising administering a polynucleotide, polypeptide, agonist and/or agonist to the resection margins of a tumor subsequent to excision, such that the local recurrence of cancer and the formation of new blood vessels at the site is inhibited. Within one embodiment of the invention, the anti-angiogenic compound is administered directly to the tumor excision site (e.g., applied by swabbing, brushing or otherwise coating the resection margins of the tumor with the anti-angiogenic compound). Alternatively, the anti-angiogenic compounds may be incorporated into known surgical pastes prior to administration. Within particularly preferred embodiments of the invention, the anti-angiogenic compounds are applied after hepatic resections for malignancy, and after neurosurgical operations.

[1108] Within one aspect of the present invention, polynucleotides, polypeptides, agonists and/or agonists may be administered to the resection margin of a wide variety of tumors, including for example, breast, colon, brain and hepatic tumors. For example, within one embodiment of the invention, anti-angiogenic compounds may be administered to the site of a neurological tumor subsequent to excision, such that the formation of new blood vessels at the site are inhibited.

[1109] The polynucleotides, polypeptides, agonists and/or agonists of the present invention may also be administered along with other anti-angiogenic factors. Representative examples of other anti-angiogenic factors include: Anti-Invasive Factor, retinoic acid and derivatives thereof, paclitaxel, Suramin, Tissue Inhibitor of Metalloproteinase-1, Tissue Inhibitor of Metalloproteinase-2, Plasminogen Activator Inhibitor-1, Plasminogen Activator Inhibitor-2, and various forms of the lighter “d group” transition metals.

[1110] Lighter “d group” transition metals include, for example, vanadium, molybdenum, tungsten, titanium, niobium, and tantalum species. Such transition metal species may form transition metal complexes. Suitable complexes of the above-mentioned transition metal species include oxo transition metal complexes.

[1111] Representative examples of vanadium complexes include oxo vanadium complexes such as vanadate and vanadyl complexes. Suitable vanadate complexes include metavanadate and orthovanadate complexes such as, for example, ammonium metavanadate, sodium metavanadate, and sodium orthovanadate. Suitable vanadyl complexes include, for example, vanadyl acetylacetonate and vanadyl sulfate including vanadyl sulfate hydrates such as vanadyl sulfate mono- and trihydrates.

[1112] Representative examples of tungsten and molybdenum complexes also include oxo complexes. Suitable oxo tungsten complexes include tungstate and tungsten oxide complexes. Suitable tungstate complexes include ammonium tungstate, calcium tungstate, sodium tungstate dihydrate, and tungstic acid. Suitable tungsten oxides include tungsten (IV) oxide and tungsten (VI) oxide. Suitable oxo molybdenum complexes include molybdate, molybdenum oxide, and molybdenyl complexes. Suitable molybdate complexes include ammonium molybdate and its hydrates, sodium molybdate and its hydrates, and potassium molybdate and its hydrates. Suitable molybdenum oxides include molybdenum (VI) oxide, molybdenum (VI) oxide, and molybdic acid. Suitable molybdenyl complexes include, for example, molybdenyl acetylacetonate. Other suitable tungsten and molybdenum complexes include hydroxo derivatives derived from, for example, glycerol, tartaric acid, and sugars.

[1113] A wide variety of other anti-angiogenic factors may also be utilized within the context of the present invention. Representative examples include platelet factor 4; protamine sulphate; sulphated chitin derivatives (prepared from queen crab shells), (Murata et al., Cancer Res. 51:22-26, 1991); Sulphated Polysaccharide Peptidoglycan Complex (SP-PG) (the function of this compound may be enhanced by the presence of steroids such as estrogen, and tamoxifen citrate); Staurosporine; modulators of matrix metabolism, including for example, proline analogs, cishydroxyproline, d, L-3,4-dehydroproline, Thiaproline, alpha,alpha-dipyridyl, aminopropionitrile fumarate; 4-propyl-5-(4-pyridinyl)-2(3H)-oxazolone; Methotrexate; Mitoxantrone; Heparin; Interferons; 2 Macroglobulin-serum; ChIMP-3 (Pavloff et al., J. Bio. Chem. 267:17321-17326, 1992); Chymostatin (Tomkinson et al., Biochem J. 286:475-480, 1992); Cyclodextrin Tetradecasulfate; Eponemycin; Camptothecin; Fumagillin (Ingber et al., Nature 348:555-557, 1990); Gold Sodium Thiomalate (“GST”; Matsubara and Ziff, J. Clin. Invest. 79:1440-1446, 1987); anticollagenase-serum; alpha2-antiplasmin (Holmes et al., J. Biol. Chem. 262(4):1659-1664, 1987); Bisantrene (National Cancer Institute); Lobenzarit disodium (N-(2)-carboxyphenyl-4-chloroanthronilic acid disodium or “CCA”; Takeuchi et al., Agents Actions 36:312-316, 1992); Thalidomide; Angostatic steroid; AGM-1470; carboxynaminolmidazole; and metalloproteinase inhibitors such as BB94.

[1114] Diseases at the Cellular Level

[1115] Diseases associated with increased cell survival or the inhibition of apoptosis that could be treated, prevented, and/or diagnosed by the polynucleotides or polypeptides and/or antagonists or agonists of the invention, include cancers (such as follicular lymphomas, carcinomas with p53 mutations, and hormone-dependent tumors, including, but not limited to colon cancer, cardiac tumors, pancreatic cancer, melanoma, retinoblastoma, glioblastoma, lung cancer, intestinal cancer, testicular cancer, stomach cancer, neuroblastoma, myxoma, myoma, lymphoma, endothelioma, osteoblastoma, osteoclastoma, osteosarcoma, chondrosarcoma, adenoma, breast cancer, prostate cancer, Kaposi's sarcoma and ovarian cancer); autoimmune diseases, disorders, and/or conditions (such as, multiple sclerosis, Sjogren's syndrome, Hashimoto's thyroiditis, biliary cirrhosis, Behcet's disease, Crohn's disease, polymyositis, systemic lupus erythematosus and immune-related glomerulonephritis and rheumatoid arthritis) and viral infections (such as herpes viruses, pox viruses and adenoviruses), inflammation, graft v. host disease, acute graft rejection, and chronic graft rejection. In preferred embodiments, the polynucleotides or polypeptides, and/or agonists or antagonists of the invention are used to inhibit growth, progression, and/or metastasis of cancers, in particular those listed above.

[1116] Additional diseases or conditions associated with increased cell survival that could be treated, prevented or diagnosed by the polynucleotides or polypeptides, or agonists or antagonists of the invention, include, but are not limited to, progression, and/or metastases of malignancies and related disorders such as leukemia (including acute leukemias (e.g., acute lymphocytic leukemia, acute myelocytic leukemia (including myeloblastic, promyelocytic, myelomonocytic, monocytic, and erythroleukemia)) and chronic leukemias (e.g., chronic myelocytic (granulocytic) leukemia and chronic lymphocytic leukemia)), polycythemia vera, lymphomas (e.g., Hodgkin's disease and non-Hodgkin's disease), multiple myeloma, Waldenstrom's macroglobulinemia, heavy chain disease, and solid tumors including, but not limited to, sarcomas and carcinomas such as fibrosarcoma, myxosarcoma, liposarcoma, chondrosarcoma, osteogenic sarcoma, chordoma, angiosarcoma, endotheliosarcoma, lymphangiosarcoma, lymphangioendotheliosarcoma, synovioma, mesothelioma, Ewing's tumor, leiomyosarcoma, rhabdomyosarcoma, colon carcinoma, pancreatic cancer, breast cancer, ovarian cancer, prostate cancer, squamous cell carcinoma, basal cell carcinoma, adenocarcinoma, sweat gland carcinoma, sebaceous gland carcinoma, papillary carcinoma, papillary adenocarcinomas, cystadenocarcinoma, medullary carcinoma, bronchogenic carcinoma, renal cell carcinoma, hepatoma, bile duct carcinoma, choriocarcinoma, seminoma, embryonal carcinoma, Wilm's tumor, cervical cancer, testicular tumor, lung carcinoma, small cell lung carcinoma, bladder carcinoma, epithelial carcinoma, glioma, astrocytoma, medulloblastoma, craniopharyngioma, ependymoma, pinealoma, hemangioblastoma, acoustic neuroma, oligodendroglioma, menangioma, melanoma, neuroblastoma, and retinoblastoma.

[1117] Diseases associated with increased apoptosis that could be treated, prevented, and/or diagnosed by the polynucleotides or polypeptides, and/or agonists or antagonists of the invention, include AIDS; neurodegenerative diseases, disorders, and/or conditions (such as Alzheimer's disease, Parkinson's disease, Amyotrophic lateral sclerosis, Retinitis pigmentosa, Cerebellar degeneration and brain tumor or prior associated disease); autoimmune diseases, disorders, and/or conditions (such as, multiple sclerosis, Sjogren's syndrome, Hashimoto's thyroiditis, biliary cirrhosis, Behcet's disease, Crohn's disease, polymyositis, systemic lupus erythematosus and immune-related glomerulonephritis and rheumatoid arthritis) myelodysplastic syndromes (such as aplastic anemia), graft v. host disease, ischemic injury (such as that caused by myocardial infarction, stroke and reperfusion injury), liver injury (e.g., hepatitis related liver injury, ischemia/reperfusion injury, cholestosis (bile duct injury) and liver cancer); toxin-induced liver disease (such as that caused by alcohol), septic shock, cachexia and anorexia.

[1118] Wound Healing and Epithelial Cell Proliferation

[1119] In accordance with yet a further aspect of the present invention, there is provided a process for utilizing the polynucleotides or polypeptides, and/or agonists or antagonists of the invention, for therapeutic purposes, for example, to stimulate epithelial cell proliferation and basal keratinocytes for the purpose of wound healing, and to stimulate hair follicle production and healing of dermal wounds. Polynucleotides or polypeptides, as well as agonists or antagonists of the invention, may be clinically useful in stimulating wound healing including surgical wounds, excisional wounds, deep wounds involving damage of the dermis and epidermis, eye tissue wounds, dental tissue wounds, oral cavity wounds, diabetic ulcers, dermal ulcers, cubitus ulcers, arterial ulcers, venous stasis ulcers, burns resulting from heat exposure or chemicals, and other abnormal wound healing conditions such as uremia, malnutrition, vitamin deficiencies and complications associated with systemic treatment with steroids, radiation therapy and antineoplastic drugs and antimetabolites. Polynucleotides or polypeptides, and/or agonists or antagonists of the invention, could be used to promote dermal reestablishment subsequent to dermal loss

[1120] The polynucleotides or polypeptides, and/or agonists or antagonists of the invention, could be used to increase the adherence of skin grafts to a wound bed and to stimulate re-epithelialization from the wound bed. The following are a non-exhaustive list of grafts that polynucleotides or polypeptides, agonists or antagonists of the invention, could be used to increase adherence to a wound bed: autografts, artificial skin, allografts, autodermic graft, autoepidermic grafts, avacular grafts, Blair-Brown grafts, bone graft, brephoplastic grafts, cutis graft, delayed graft, dermic graft, epidermic graft, fascia graft, full thickness graft, heterologous graft, xenograft, homologous graft, hyperplastic graft, lamellar graft, mesh graft, mucosal graft, Ollier-Thiersch graft, omenpal graft, patch graft, pedicle graft, penetrating graft, split skin graft, thick split graft. The polynucleotides or polypeptides, and/or agonists or antagonists of the invention, can be used to promote skin strength and to improve the appearance of aged skin.

[1121] It is believed that the polynucleotides or polypeptides, and/or agonists or antagonists of the invention, will also produce changes in hepatocyte proliferation, and epithelial cell proliferation in the lung, breast, pancreas, stomach, small intestine, and large intestine. The polynucleotides or polypeptides, and/or agonists or antagonists of the invention, could promote proliferation of epithelial cells such as sebocytes, hair follicles, hepatocytes, type II pneumocytes, mucin-producing goblet cells, and other epithelial cells and their progenitors contained within the skin, lung, liver, and gastrointestinal tract. The polynucleotides or polypeptides, and/or agonists or antagonists of the invention, may promote proliferation of endothelial cells, keratinocytes, and basal keratinocytes.

[1122] The polynucleotides or polypeptides, and/or agonists or antagonists of the invention, could also be used to reduce the side effects of gut toxicity that result from radiation, chemotherapy treatments or viral infections. The polynucleotides or polypeptides, and/or agonists or antagonists of the invention, may have a cytoprotective effect on the small intestine mucosa. The polynucleotides or polypeptides, and/or agonists or antagonists of the invention, may also stimulate healing of mucositis (mouth ulcers) that result from chemotherapy and viral infections.

[1123] The polynucleotides or polypeptides, and/or agonists or antagonists of the invention, could further be used in full regeneration of skin in full and partial thickness skin defects, including burns, (i.e., repopulation of hair follicles, sweat glands, and sebaceous glands), treatment of other skin defects such as psoriasis. The polynucleotides or polypeptides, and/or agonists or antagonists of the invention, could be used to treat epidermolysis bullosa, a defect in adherence of the epidermis to the underlying dermis which results in frequent, open and painful blisters by accelerating reepithelialization of these lesions. The polynucleotides or polypeptides, and/or agonists or antagonists of the invention, could also be used to treat gastric and doudenal ulcers and help heal by scar formation of the mucosal lining and regeneration of glandular mucosa and duodenal mucosal lining more rapidly. Inflamamatory bowel diseases, such as Crohn's disease and ulcerative colitis, are diseases which result in destruction of the mucosal surface of the small or large intestine, respectively. Thus, the polynucleotides or polypeptides, and/or agonists or antagonists of the invention, could be used to promote the resurfacing of the mucosal surface to aid more rapid healing and to prevent progression of inflammatory bowel disease. Treatment with the polynucleotides or polypeptides, and/or agonists or antagonists of the invention, is expected to have a significant effect on the production of mucus throughout the gastrointestinal tract and could be used to protect the intestinal mucosa from injurious substances that are ingested or following surgery. The polynucleotides or polypeptides, and/or agonists or antagonists of the invention, could be used to treat diseases associate with the under expression of the polynucleotides of the invention.

[1124] Moreover, the polynucleotides or polypeptides, and/or agonists or antagonists of the invention, could be used to prevent and heal damage to the lungs due to various pathological states. A growth factor such as the polynucleotides or polypeptides, and/or agonists or antagonists of the invention, which could stimulate proliferation and differentiation and promote the repair of alveoli and brochiolar epithelium to prevent or treat acute or chronic lung damage. For example, emphysema, which results in the progressive loss of aveoli, and inhalation injuries, i.e., resulting from smoke inhalation and burns, that cause necrosis of the bronchiolar epithelium and alveoli could be effectively treated, prevented, and/or diagnosed using the polynucleotides or polypeptides, and/or agonists or antagonists of the invention. Also, the polynucleotides or polypeptides, and/or agonists or antagonists of the invention, could be used to stimulate the proliferation of and differentiation of type II pneumocytes, which may help treat or prevent disease such as hyaline membrane diseases, such as infant respiratory distress syndrome and bronchopulmonary displasia, in premature infants.

[1125] The polynucleotides or polypeptides, and/or agonists or antagonists of the invention, could stimulate the proliferation and differentiation of hepatocytes and, thus, could be used to alleviate or treat liver diseases and pathologies such as fulminant liver failure caused by cirrhosis, liver damage caused by viral hepatitis and toxic substances (i.e., acetaminophen, carbon tetraholoride and other hepatotoxins known in the art).

[1126] In addition, the polynucleotides or polypeptides, and/or agonists or antagonists of the invention, could be used treat or prevent the onset of diabetes mellitus. In patients with newly diagnosed Types I and II diabetes, where some islet cell function remains, the polynucleotides or polypeptides, and/or agonists or antagonists of the invention, could be used to maintain the islet function so as to alleviate, delay or prevent permanent manifestation of the disease. Also, the polynucleotides or polypeptides, and/or agonists or antagonists of the invention, could be used as an auxiliary in islet cell transplantation to improve or promote islet cell function.

[1127] Neurological Diseases

[1128] Nervous system diseases, disorders, and/or conditions, which can be treated, prevented, and/or diagnosed with the compositions of the invention (e.g., polypeptides, polynucleotides, and/or agonists or antagonists), include, but are not limited to, nervous system injuries, and diseases, disorders, and/or conditions which result in either a disconnection of axons, a diminution or degeneration of neurons, or demyelination. Nervous system lesions which may be treated, prevented, and/or diagnosed in a patient (including human and non-human mammalian patients) according to the invention, include but are not limited to, the following lesions of either the central (including spinal cord, brain) or peripheral nervous systems: (1) ischemic lesions, in which a lack of oxygen in a portion of the nervous system results in neuronal injury or death, including cerebral infarction or ischemia, or spinal cord infarction or ischemia; (2) traumatic lesions, including lesions caused by physical injury or associated with surgery, for example, lesions which sever a portion of the nervous system, or compression injuries; (3) malignant lesions, in which a portion of the nervous system is destroyed or injured by malignant tissue which is either a nervous system associated malignancy or a malignancy derived from non-nervous system tissue; (4) infectious lesions, in which a portion of the nervous system is destroyed or injured as a result of infection, for example, by an abscess or associated with infection by human immunodeficiency virus, herpes zoster, or herpes simplex virus or with Lyme disease, tuberculosis, syphilis; (5) degenerative lesions, in which a portion of the nervous system is destroyed or injured as a result of a degenerative process including but not limited to degeneration associated with Parkinson's disease, Alzheimer's disease, Huntington's chorea, or amyotrophic lateral sclerosis (ALS); (6) lesions associated with nutritional diseases, disorders, and/or conditions, in which a portion of the nervous system is destroyed or injured by a nutritional disorder or disorder of metabolism including but not limited to, vitamin B12 deficiency, folic acid deficiency, Wernicke disease, tobacco-alcohol amblyopia, Marchiafava-Bignami disease (primary degeneration of the corpus callosum), and alcoholic cerebellar degeneration; (7) neurological lesions associated with systemic diseases including, but not limited to, diabetes (diabetic neuropathy, Bell's palsy), systemic lupus erythematosus, carcinoma, or sarcoidosis; (8) lesions caused by toxic substances including alcohol, lead, or particular neurotoxins; and (9) demyelinated lesions in which a portion of the nervous system is destroyed or injured by a demyelinating disease including, but not limited to, multiple sclerosis, human immunodeficiency virus-associated myelopathy, transverse myelopathy or various etiologies, progressive multifocal leukoencephalopathy, and central pontine myelinolysis.

[1129] In a preferred embodiment, the polypeptides, polynucleotides, or agonists or antagonists of the invention are used to protect neural cells from the damaging effects of cerebral hypoxia. According to this embodiment, the compositions of the invention are used to treat, prevent, and/or diagnose neural cell injury associated with cerebral hypoxia. In one aspect of this embodiment, the polypeptides, polynucleotides, or agonists or antagonists of the invention are used to treat, prevent, and/or diagnose neural cell injury associated with cerebral ischemia. In another aspect of this embodiment, the polypeptides, polynucleotides, or agonists or antagonists of the invention are used to treat, prevent, and/or diagnose neural cell injury associated with cerebral infarction. In another aspect of this embodiment, the polypeptides, polynucleotides, or agonists or antagonists of the invention are used to treat, prevent, and/or diagnose or prevent neural cell injury associated with a stroke. In a further aspect of this embodiment, the polypeptides, polynucleotides, or agonists or antagonists of the invention are used to treat, prevent, and/or diagnose neural cell injury associated with a heart attack.

[1130] The compositions of the invention which are useful for treating or preventing a nervous system disorder may be selected by testing for biological activity in promoting the survival or differentiation of neurons. For example, and not by way of limitation, compositions of the invention which elicit any of the following effects may be useful according to the invention: (1) increased survival time of neurons in culture; (2) increased sprouting of neurons in culture or in vivo; (3) increased production of a neuron-associated molecule in culture or in vivo, e.g., choline acetyltransferase or acetylcholinesterase with respect to motor neurons; or (4) decreased symptoms of neuron dysfunction in vivo. Such effects may be measured by any method known in the art. In preferred, non-limiting embodiments, increased survival of neurons may routinely be measured using a method set forth herein or otherwise known in the art, such as, for example, the method set forth in Arakawa et al. (J. Neurosci. 10:3507-3515 (1990)); increased sprouting of neurons may be detected by methods known in the art, such as, for example, the methods set forth in Pestronk et al. (Exp. Neurol. 70:65-82 (1980)) or Brown et al. (Ann. Rev. Neurosci. 4:17-42 (1981)); increased production of neuron-associated molecules may be measured by bioassay, enzymatic assay, antibody binding, Northern blot assay, etc., using techniques known in the art and depending on the molecule to be measured; and motor neuron dysfunction may be measured by assessing the physical manifestation of motor neuron disorder, e.g., weakness, motor neuron conduction velocity, or functional disability.

[1131] In specific embodiments, motor neuron diseases, disorders, and/or conditions that may be treated, prevented, and/or diagnosed according to the invention include, but are not limited to, diseases, disorders, and/or conditions such as infarction, infection, exposure to toxin, trauma, surgical damage, degenerative disease or malignancy that may affect motor neurons as well as other components of the nervous system, as well as diseases, disorders, and/or conditions that selectively affect neurons such as amyotrophic lateral sclerosis, and including, but not limited to, progressive spinal muscular atrophy, progressive bulbar palsy, primary lateral sclerosis, infantile and juvenile muscular atrophy, progressive bulbar paralysis of childhood (Fazio-Londe syndrome), poliomyelitis and the post polio syndrome, and Hereditary Motorsensory Neuropathy (Charcot-Marie-Tooth Disease).

[1132] Infectious Disease

[1133] A polypeptide or polynucleotide and/or agonist or antagonist of the present invention can be used to treat, prevent, and/or diagnose infectious agents. For example, by increasing the immune response, particularly increasing the proliferation and differentiation of B and/or T cells, infectious diseases may be treated, prevented, and/or diagnosed. The immune response may be increased by either enhancing an existing immune response, or by initiating a new immune response. Alternatively, polypeptide or polynucleotide and/or agonist or antagonist of the present invention may also directly inhibit the infectious agent, without necessarily eliciting an immune response.

[1134] Viruses are one example of an infectious agent that can cause disease or symptoms that can be treated, prevented, and/or diagnosed by a polynucleotide or polypeptide and/or agonist or antagonist of the present invention. Examples of viruses, include, but are not limited to Examples of viruses, include, but are not limited to the following DNA and RNA viruses and viral families: Arbovirus, Adenoviridae, Arenaviridae, Arterivirus, Birnaviridae, Bunyaviridae, Caliciviridae, Circoviridae, Coronaviridae, Dengue, EBV, HIV, Flaviviridae, Hepadnaviridae (Hepatitis), Herpesviridae (such as, Cytomegalovirus, Herpes Simplex, Herpes Zoster), Mononegavirus (e.g., Paramyxoviridae, Morbillivirus, Rhabdoviridae), Orthomyxoviridae (e.g., Influenza A, Influenza B, and parainfluenza), Papiloma virus, Papovaviridae, Parvoviridae, Picornaviridae, Poxviridae (such as Smallpox or Vaccinia), Reoviridae (e.g., Rotavirus), Retroviridae (HTLV-I, HTLV-II, Lentivirus), and Togaviridae (e.g., Rubivirus). Viruses falling within these families can cause a variety of diseases or symptoms, including, but not limited to: arthritis, bronchiollitis, respiratory syncytial virus, encephalitis, eye infections (e.g., conjunctivitis, keratitis), chronic fatigue syndrome, hepatitis (A, B, C, E, Chronic Active, Delta), Japanese B encephalitis, Junin, Chikungunya, Rift Valley fever, yellow fever, meningitis, opportunistic infections (e.g., AIDS), pneumonia, Burkitt's Lymphoma, chickenpox, hemorrhagic fever, Measles, Mumps, Parainfluenza, Rabies, the common cold, Polio, leukemia, Rubella, sexually transmitted diseases, skin diseases (e.g., Kaposi's, warts), and viremia. polynucleotides or polypeptides, or agonists or antagonists of the invention, can be used to treat, prevent, and/or diagnose any of these symptoms or diseases. In specific embodiments, polynucleotides, polypeptides, or agonists or antagonists of the invention are used to treat, prevent, and/or diagnose: meningitis, Dengue, EBV, and/or hepatitis (e.g., hepatitis B). In an additional specific embodiment polynucleotides, polypeptides, or agonists or antagonists of the invention are used to treat patients nonresponsive to one or more other commercially available hepatitis vaccines. In a further specific embodiment polynucleotides, polypeptides, or agonists or antagonists of the invention are used to treat, prevent, and/or diagnose AIDS.

[1135] Similarly, bacterial or fungal agents that can cause disease or symptoms and that can be treated, prevented, and/or diagnosed by a polynucleotide or polypeptide and/or agonist or antagonist of the present invention include, but not limited to, include, but not limited to, the following Gram-Negative and Gram-positive bacteria and bacterial families and fungi: Actinomycetales (e.g., Corynebacterium, Mycobacterium, Norcardia), Cryptococcus neoformans, Aspergillosis, Bacillaceae (e.g., Anthrax, Clostridium), Bacteroidaceae, Blastomycosis, Bordetella, Borrelia (e.g., Borrelia burgdorferi), Brucellosis, Candidiasis, Campylobacter, Coccidioidomycosis, Cryptococcosis, Dermatocycoses, E. coli (e.g., Enterotoxigenic E. coli and Enterohemorrhagic E. coli), Enterobacteriaceae (Klebsiella, Salmonella (e.g., Salmonella typhi, and Salmonella paratyphi), Serratia, Yersinia), Erysipelothrix, Helicobacter, Legionellosis, Leptospirosis, Listeria, Mycoplasmatales, Mycobacterium leprae, Vibrio cholerae, Neisseriaceae (e.g., Acinetobacter, Gonorrhea, Menigococcal), Meisseria meningitidis, Pasteurellacea Infections (e.g., Actinobacillus, Heamophilus (e.g., Heamophilus influenza type B), Pasteurella), Pseudomonas, Rickettsiaceae, Chlamydiaceae, Syphilis, Shigella spp., Staphylococcal, Meningiococcal, Pneumococcal and Streptococcal (e.g., Streptococcus pneumoniae and Group B Streptococcus). These bacterial or fungal families can cause the following diseases or symptoms, including, but not limited to: bacteremia, endocarditis, eye infections (conjunctivitis, tuberculosis, uveitis), gingivitis, opportunistic infections (e.g., AIDS related infections), paronychia, prosthesis-related infections, Reiter's Disease, respiratory tract infections, such as Whooping Cough or Empyema, sepsis, Lyme Disease, Cat-Scratch Disease, Dysentery, Paratyphoid Fever, food poisoning, Typhoid, pneumonia, Gonorrhea, meningitis (e.g., mengitis types A and B), Chlamydia, Syphilis, Diphtheria, Leprosy, Paratuberculosis, Tuberculosis, Lupus, Botulism, gangrene, tetanus, impetigo, Rheumatic Fever, Scarlet Fever, sexually transmitted diseases, skin diseases (e.g., cellulitis, dermatocycoses), toxemia, urinary tract infections, wound infections. Polynucleotides or polypeptides, agonists or antagonists of the invention, can be used to treat, prevent, and/or diagnose any of these symptoms or diseases. In specific embodiments, polynucleotides, polypeptides, agonists or antagonists of the invention are used to treat, prevent, and/or diagnose: tetanus, Diptheria, botulism, and/or meningitis type B.

[1136] Moreover, parasitic agents causing disease or symptoms that can be treated, prevented, and/or diagnosed by a polynucleotide or polypeptide and/or agonist or antagonist of the present invention include, but not limited to, the following families or class: Amebiasis, Babesiosis, Coccidiosis, Cryptosporidiosis, Dientamoebiasis, Dourine, Ectoparasitic, Giardiasis, Helminthiasis, Leishmaniasis, Theileriasis, Toxoplasmosis, Trypanosomiasis, and Trichomonas and Sporozoans (e.g., Plasmodium virax, Plasmodium falciparium, Plasmodium malariae and Plasmodium ovale). These parasites can cause a variety of diseases or symptoms, including, but not limited to: Scabies, Trombiculiasis, eye infections, intestinal disease (e.g., dysentery, giardiasis), liver disease, lung disease, opportunistic infections (e.g., AIDS related), malaria, pregnancy complications, and toxoplasmosis. polynucleotides or polypeptides, or agonists or antagonists of the invention, can be used totreat, prevent, and/or diagnose any of these symptoms or diseases. In specific embodiments, polynucleotides, polypeptides, or agonists or antagonists of the invention are used to treat, prevent, and/or diagnose malaria.

[1137] Preferably, treatment or prevention using a polypeptide or polynucleotide and/or agonist or antagonist of the present invention could either be by administering an effective amount of a polypeptide to the patient, or by removing cells from the patient, supplying the cells with a polynucleotide of the present invention, and returning the engineered cells to the patient (ex vivo therapy). Moreover, the polypeptide or polynucleotide of the present invention can be used as an antigen in a vaccine to raise an immune response against infectious disease.

[1138] Regeneration

[1139] A polynucleotide or polypeptide and/or agonist or antagonist of the present invention can be used to differentiate, proliferate, and attract cells, leading to the regeneration of tissues. (See, Science 276:59-87 (1997).) The regeneration of tissues could be used to repair, replace, or protect tissue damaged by congenital defects, trauma (wounds, burns, incisions, or ulcers), age, disease (e.g. osteoporosis, osteocarthritis, periodontal disease, liver failure), surgery, including cosmetic plastic surgery, fibrosis, reperfusion injury, or systemic cytokine damage.

[1140] Tissues that could be regenerated using the present invention include organs (e.g., pancreas, liver, intestine, kidney, skin, endothelium), muscle (smooth, skeletal or cardiac), vasculature (including vascular and lymphatics), nervous, hematopoietic, and skeletal (bone, cartilage, tendon, and ligament) tissue. Preferably, regeneration occurs without or decreased scarring. Regeneration also may include angiogenesis.

[1141] Moreover, a polynucleotide or polypeptide and/or agonist or antagonist of the present invention may increase regeneration of tissues difficult to heal. For example, increased tendon/ligament regeneration would quicken recovery time after damage. A polynucleotide or polypeptide and/or agonist or antagonist of the present invention could also be used prophylactically in an effort to avoid damage. Specific diseases that could be treated, prevented, and/or diagnosed include of tendinitis, carpal tunnel syndrome, and other tendon or ligament defects. A further example of tissue regeneration of non-healing wounds includes pressure ulcers, ulcers associated with vascular insufficiency, surgical, and traumatic wounds.

[1142] Similarly, nerve and brain tissue could also be regenerated by using a polynucleotide or polypeptide and/or agonist or antagonist of the present invention to proliferate and differentiate nerve cells. Diseases that could be treated, prevented, and/or diagnosed using this method include central and peripheral nervous system diseases, neuropathies, or mechanical and traumatic diseases, disorders, and/or conditions (e.g., spinal cord disorders, head trauma, cerebrovascular disease, and stoke). Specifically, diseases associated with peripheral nerve injuries, peripheral neuropathy (e.g., resulting from chemotherapy or other medical therapies), localized neuropathies, and central nervous system diseases (e.g., Alzheimer's disease, Parkinson's disease, Huntington's disease, amyotrophic lateral sclerosis, and Shy-Drager syndrome), could all be treated, prevented, and/or diagnosed using the polynucleotide or polypeptide and/or agonist or antagonist of the present invention.

[1143] Chemotaxis

[1144] A polynucleotide or polypeptide and/or agonist or antagonist of the present invention may have chemotaxis activity. A chemotaxic molecule attracts or mobilizes cells (e.g., monocytes, fibroblasts, neutrophils, T-cells, mast cells, eosinophils, epithelial and/or endothelial cells) to a particular site in the body, such as inflammation, infection, or site of hyperproliferation. The mobilized cells can then fight off and/or heal the particular trauma or abnormality.

[1145] A polynucleotide or polypeptide and/or agonist or antagonist of the present invention may increase chemotaxic activity of particular cells. These chemotactic molecules can then be used to treat, prevent, and/or diagnose inflammation, infection, hyperproliferative diseases, disorders, and/or conditions, or any immune system disorder by increasing the number of cells targeted to a particular location in the body. For example, chemotaxic molecules can be used to treat, prevent, and/or diagnose wounds and other trauma to tissues by attracting immune cells to the injured location. Chemotactic molecules of the present invention can also attract fibroblasts, which can be used to treat, prevent, and/or diagnose wounds.

[1146] It is also contemplated that a polynucleotide or polypeptide and/or agonist or antagonist of the present invention may inhibit chemotactic activity. These molecules could also be used to treat, prevent, and/or diagnose diseases, disorders, and/or conditions. Thus, a polynucleotide or polypeptide and/or agonist or antagonist of the present invention could be used as an inhibitor of chemotaxis.

[1147] Binding Activity

[1148] A polypeptide of the present invention may be used to screen for molecules that bind to the polypeptide or for molecules to which the polypeptide binds. The binding of the polypeptide and the molecule may activate (agonist), increase, inhibit (antagonist), or decrease activity of the polypeptide or the molecule bound. Examples of such molecules include antibodies, oligonucleotides, proteins (e.g., receptors),or small molecules.

[1149] Preferably, the molecule is closely related to the natural ligand of the polypeptide, e.g., a fragment of the ligand, or a natural substrate, a ligand, a structural or functional mimetic. (See, Coligan et al., Current Protocols in Immunology 1(2):Chapter 5 (1991).) Similarly, the molecule can be closely related to the natural receptor to which the polypeptide binds, or at least, a fragment of the receptor capable of being bound by the polypeptide (e.g., active site). In either case, the molecule can be rationally designed using known techniques.

[1150] Preferably, the screening for these molecules involves producing appropriate cells which express the polypeptide, either as a secreted protein or on the cell membrane. Preferred cells include cells from mammals, yeast, Drosophila, or E. coli. Cells expressing the polypeptide (or cell membrane containing the expressed polypeptide) are then preferably contacted with a test compound potentially containing the molecule to observe binding, stimulation, or inhibition of activity of either the polypeptide or the molecule.

[1151] The assay may simply test binding of a candidate compound to the polypeptide, wherein binding is detected by a label, or in an assay involving competition with a labeled competitor. Further, the assay may test whether the candidate compound results in a signal generated by binding to the polypeptide.

[1152] Alternatively, the assay can be carried out using cell-free preparations, polypeptide/molecule affixed to a solid support, chemical libraries, or natural product mixtures. The assay may also simply comprise the steps of mixing a candidate compound with a solution containing a polypeptide, measuring polypeptide/molecule activity or binding, and comparing the polypeptide/molecule activity or binding to a standard.

[1153] Preferably, an ELISA assay can measure polypeptide level or activity in a sample (e.g., biological sample) using a monoclonal or polyclonal antibody. The antibody can measure polypeptide level or activity by either binding, directly or indirectly, to the polypeptide or by competing with the polypeptide for a substrate.

[1154] Additionally, the receptor to which a polypeptide of the invention binds can be identified by numerous methods known to those of skill in the art, for example, ligand panning and FACS sorting (Coligan, et al., Current Protocols in Immun., 1(2), Chapter 5, (1991)). For example, expression cloning is employed wherein polyadenylated RNA is prepared from a cell responsive to the polypeptides, for example, NIH3T3 cells which are known to contain multiple receptors for the FGF family proteins, and SC-3 cells, and a cDNA library created from this RNA is divided into pools and used to transfect COS cells or other cells that are not responsive to the polypeptides. Transfected cells which are grown on glass slides are exposed to the polypeptide of the present invention, after they have been labeled. The polypeptides can be labeled by a variety of means including iodination or inclusion of a recognition site for a site-specific protein kinase.

[1155] Following fixation and incubation, the slides are subjected to auto-radiographic analysis. Positive pools are identified and sub-pools are prepared and re-transfected using an iterative sub-pooling and re-screening process, eventually yielding a single clones that encodes the putative receptor.

[1156] As an alternative approach for receptor identification, the labeled polypeptides can be photoaffinity linked with cell membrane or extract preparations that express the receptor molecule. Cross-linked material is resolved by PAGE analysis and exposed to X-ray film. The labeled complex containing the receptors of the polypeptides can be excised, resolved into peptide fragments, and subjected to protein microsequencing. The amino acid sequence obtained from microsequencing would be used to design a set of degenerate oligonucleotide probes to screen a cDNA library to identify the genes encoding the putative receptors.

[1157] Moreover, the techniques of gene-shuffling, motif-shuffling, exon-shuffling, and/or codon-shuffling (collectively referred to as “DNA shuffling”) may be employed to modulate the activities of polypeptides of the invention thereby effectively generating agonists and antagonists of polypeptides of the invention. See generally, U.S. Pat. Nos. 5,605,793, 5,811,238, 5,830,721, 5,834,252, and 5,837,458, and Patten, P. A., et al., Curr. Opinion Biotechnol. 8:724-33 (1997); Harayama, S. Trends Biotechnol. 16(2):76-82 (1998); Hansson, L. O., et al., J. Mol. Biol. 287:265-76 (1999); and Lorenzo, M. M. and Blasco, R. Biotechniques 24(2):308-13 (1998) (each of these patents and publications are hereby incorporated by reference). In one embodiment, alteration of polynucleotides and corresponding polypeptides of the invention may be achieved by DNA shuffling. DNA shuffling involves the assembly of two or more DNA segments into a desired polynucleotide sequence of the invention molecule by homologous, or site-specific, recombination. In another embodiment, polynucleotides and corresponding polypeptides of the invention may be altered by being subjected to random mutagenesis by error-prone PCR, random nucleotide insertion or other methods prior to recombination. In another embodiment, one or more components, motifs, sections, parts, domains, fragments, etc., of the polypeptides of the invention may be recombined with one or more components, motifs, sections, parts, domains, fragments, etc. of one or more heterologous molecules. In preferred embodiments, the heterologous molecules are family members. In further preferred embodiments, the heterologous molecule is a growth factor such as, for example, platelet-derived growth factor (PDGF), insulin-like growth factor (IGF-I), transforming growth factor (TGF)-alpha, epidermal growth factor (EGF), fibroblast growth factor (FGF), TGF-beta, bone morphogenetic protein (BMP)-2, BMP-4, BMP-5, BMP-6, BMP-7, activins A and B, decapentaplegic(dpp), 60A, OP-2, dorsalin, growth differentiation factors (GDFs), nodal, MIS, inhibin-alpha, TGF-betal, TGF-beta2, TGF-beta3, TGF-beta5, and glial-derived neurotrophic factor (GDNF).

[1158] Other preferred fragments are biologically active fragments of the polypeptides of the invention. Biologically active fragments are those exhibiting activity similar, but not necessarily identical, to an activity of the polypeptide. The biological activity of the fragments may include an improved desired activity, or a decreased undesirable activity.

[1159] Additionally, this invention provides a method of screening compounds to identify those which modulate the action of the polypeptide of the present invention. An example of such an assay comprises combining a mammalian fibroblast cell, a the polypeptide of the present invention, the compound to be screened and 3[H] thymidine under cell culture conditions where the fibroblast cell would normally proliferate. A control assay may be performed in the absence of the compound to be screened and compared to the amount of fibroblast proliferation in the presence of the compound to determine if the compound stimulates proliferation by determining the uptake of 3[H] thymidine in each case. The amount of fibroblast cell proliferation is measured by liquid scintillation chromatography which measures the incorporation of 3[H] thymidine. Both agonist and antagonist compounds may be identified by this procedure.

[1160] In another method, a mammalian cell or membrane preparation expressing a receptor for a polypeptide of the present invention is incubated with a labeled polypeptide of the present invention in the presence of the compound. The ability of the compound to enhance or block this interaction could then be measured. Alternatively, the response of a known second messenger system following interaction of a compound to be screened and the receptor is measured and the ability of the compound to bind to the receptor and elicit a second messenger response is measured to determine if the compound is a potential agonist or antagonist. Such second messenger systems include but are not limited to, cAMP guanylate cyclase, ion channels or phosphoinositide hydrolysis.

[1161] All of these above assays can be used as diagnostic or prognostic markers. The molecules discovered using these assays can be used to treat, prevent, and/or diagnose disease or to bring about a particular result in a patient (e.g., blood vessel growth) by activating or inhibiting the polypeptide/molecule. Moreover, the assays can discover agents which may inhibit or enhance the production of the polypeptides of the invention from suitably manipulated cells or tissues. Therefore, the invention includes a method of identifying compounds which bind to the polypeptides of the invention comprising the steps of: (a) incubating a candidate binding compound with the polypeptide; and (b) determining if binding has occurred. Moreover, the invention includes a method of identifying agonists/antagonists comprising the steps of: (a) incubating a candidate compound with the polypeptide, (b) assaying a biological activity, and (b) determining if a biological activity of the polypeptide has been altered.

[1162] Also, one could identify molecules bind a polypeptide of the invention experimentally by using the beta-pleated sheet regions contained in the polypeptide sequence of the protein. Accordingly, specific embodiments of the invention are directed to polynucleotides encoding polypeptides which comprise, or alternatively consist of, the amino acid sequence of each beta pleated sheet regions in a disclosed polypeptide sequence. Additional embodiments of the invention are directed to polynucleotides encoding polypeptides which comprise, or alternatively consist of, any combination or all of contained in the polypeptide sequences of the invention. Additional preferred embodiments of the invention are directed to polypeptides which comprise, or alternatively consist of, the amino acid sequence of each of the beta pleated sheet regions in one of the polypeptide sequences of the invention. Additional embodiments of the invention are directed to polypeptides which comprise, or alternatively consist of, any combination or all of the beta pleated sheet regions in one of the polypeptide sequences of the invention.

[1163] Targeted Delivery

[1164] In another embodiment, the invention provides a method of delivering compositions to targeted cells expressing a receptor for a polypeptide of the invention, or cells expressing a cell bound form of a polypeptide of the invention.

[1165] As discussed herein, polypeptides or antibodies of the invention may be associated with heterologous polypeptides, heterologous nucleic acids, toxins, or prodrugs via hydrophobic, hydrophilic, ionic and/or covalent interactions. In one embodiment, the invention provides a method for the specific delivery of compositions of the invention to cells by administering polypeptides of the invention (including antibodies) that are associated with heterologous polypeptides or nucleic acids. In one example, the invention provides a method for delivering a therapeutic protein into the targeted cell. In another example, the invention provides a method for delivering a single stranded nucleic acid (e.g., antisense or ribozymes) or double stranded nucleic acid (e.g., DNA that can integrate into the cell's genome or replicate episomally and that can be transcribed) into the targeted cell.

[1166] In another embodiment, the invention provides a method for the specific destruction of cells (e.g., the destruction of tumor cells) by administering polypeptides of the invention (e.g., polypeptides of the invention or antibodies of the invention) in association with toxins or cytotoxic prodrugs.

[1167] By “toxin” is meant compounds that bind and activate endogenous cytotoxic effector systems, radioisotopes, holotoxins, modified toxins, catalytic subunits of toxins, or any molecules or enzymes not normally present in or on the surface of a cell that under defined conditions cause the cell's death. Toxins that may be used according to the methods of the invention include, but are not limited to, radioisotopes known in the art, compounds such as, for example, antibodies (or complement fixing containing portions thereof) that bind an inherent or induced endogenous cytotoxic effector system, thymidine kinase, endonuclease, RNAse, alpha toxin, ricin, abrin, Pseudomonas exotoxin A, diphtheria toxin, saporin, momordin, gelonin, pokeweed antiviral protein, alpha-sarcin and cholera toxin. By “cytotoxic prodrug” is meant a non-toxic compound that is converted by an enzyme, normally present in the cell, into a cytotoxic compound. Cytotoxic prodrugs that may be used according to the methods of the invention include, but are not limited to, glutamyl derivatives of benzoic acid mustard alkylating agent, phosphate derivatives of etoposide or mitomycin C, cytosine arabinoside, daunorubisin, and phenoxyacetamide derivatives of doxorubicin.

[1168] Drug Screening

[1169] Further contemplated is the use of the polypeptides of the present invention, or the polynucleotides encoding these polypeptides, to screen for molecules which modify the activities of the polypeptides of the present invention. Such a method would include contacting the polypeptide of the present invention with a selected compound(s) suspected of having antagonist or agonist activity, and assaying the activity of these polypeptides following binding.

[1170] This invention is particularly useful for screening therapeutic compounds by using the polypeptides of the present invention, or binding fragments thereof, in any of a variety of drug screening techniques. The polypeptide or fragment employed in such a test may be affixed to a solid support, expressed on a cell surface, free in solution, or located intracellularly. One method of drug screening utilizes eukaryotic or prokaryotic host cells which are stably transformed with recombinant nucleic acids expressing the polypeptide or fragment. Drugs are screened against such transformed cells in competitive binding assays. One may measure, for example, the formulation of complexes between the agent being tested and a polypeptide of the present invention.

[1171] Thus, the present invention provides methods of screening for drugs or any other agents which affect activities mediated by the polypeptides of the present invention. These methods comprise contacting such an agent with a polypeptide of the present invention or a fragment thereof and assaying for the presence of a complex between the agent and the polypeptide or a fragment thereof, by methods well known in the art. In such a competitive binding assay, the agents to screen are typically labeled. Following incubation, free agent is separated from that present in bound form, and the amount of free or uncomplexed label is a measure of the ability of a particular agent to bind to the polypeptides of the present invention.

[1172] Another technique for drug screening provides high throughput screening for compounds having suitable binding affinity to the polypeptides of the present invention, and is described in great detail in European Patent Application 84/03564, published on Sep. 13, 1984, which is incorporated herein by reference herein. Briefly stated, large numbers of different small peptide test compounds are synthesized on a solid substrate, such as plastic pins or some other surface. The peptide test compounds are reacted with polypeptides of the present invention and washed. Bound polypeptides are then detected by methods well known in the art. Purified polypeptides are coated directly onto plates for use in the aforementioned drug screening techniques. In addition, non-neutralizing antibodies may be used to capture the peptide and immobilize it on the solid support.

[1173] This invention also contemplates the use of competitive drug screening assays in which neutralizing antibodies capable of binding polypeptides of the present invention specifically compete with a test compound for binding to the polypeptides or fragments thereof. In this manner, the antibodies are used to detect the presence of any peptide which shares one or more antigenic epitopes with a polypeptide of the invention.

[1174] The human HGPRBMY30_{—}1, HGPRBMY30_{—}2, HGPRBMY30_{—}3, HGPRBMY41_{—}1, HGPRBMY41_{—}2, HGPRBMY41_{—}3, HGPRBMY42, HGPRBMY42_{—}1, HGPRBMY43, and/or HGPRBMY44 polypeptides and/or peptides of the present invention, or immunogenic fragments or oligopeptides thereof, can be used for screening therapeutic drugs or compounds in a variety of drug screening techniques. The fragment employed in such a screening assay may be free in solution, affixed to a solid support, borne on a cell surface, or located intracellularly. The reduction or abolition of activity of the formation of binding complexes between the ion channel protein and the agent being tested can be measured. Thus, the present invention provides a method for screening or assessing a plurality of compounds for their specific binding affinity with a HGPRBMY30_{—}1, HGPRBMY30_{—}2, HGPRBMY30_{—}3, HGPRBMY41_{—}1, HGPRBMY41_{—}2, HGPRBMY41_{—}3, HGPRBMY42, HGPRBMY42_{—}1, HGPRBMY43, and/or HGPRBMY44 polypeptide, or a bindable peptide fragment, of this invention, comprising providing a plurality of compounds, combining the HGPRBMY30_{—}1, HGPRBMY30_{—}2, HGPRBMY30_{—}3, HGPRBMY41_{—}1, HGPRBMY41_{—}2, HGPRBMY41_{—}3, HGPRBMY42, HGPRBMY42_{—}1, HGPRBMY43, and/or HGPRBMY44 polypeptide, or a bindable peptide fragment, with each of a plurality of compounds for a time sufficient to allow binding under suitable conditions and detecting binding of the HGPRBMY30 _{—}1, HGPRBMY30_{—}2, HGPRBMY30_{—}3, HGPRBMY41_{—}1, HGPRBMY41_{—}2, HGPRBMY41_{—}3, HGPRBMY42, HGPRBMY42_{—}1, HGPRBMY43, and/or HGPRBMY44 polypeptide or peptide to each of the plurality of test compounds, thereby identifying the compounds that specifically bind to the HGPRBMY30_{—}1, HGPRBMY30_{—}2, HGPRBMY30_{—}3, HGPRBMY41_{—}1, HGPRBMY41_{—}2, HGPRBMY41_{—}3, HGPRBMY42, HGPRBMY42_{—}1, HGPRBMY43, and/or HGPRBMY44 polypeptide or peptide.

[1175] Methods of identifying compounds that modulate the activity of the novel human HGPRBMY30_{—}1, HGPRBMY30_{—}2, HGPRBMY30_{—}3, HGPRBMY41_{—}1, HGPRBMY41_{—}2, HGPRBMY41_{—}3, HGPRBMY42, HGPRBMY42_{—}1, HGPRBMY43, and/or HGPRBMY44 polypeptides and/or peptides are provided by the present invention and comprise combining a potential or candidate compound or drug modulator of calpain biological activity with an HGPRBMY30_{—}1, HGPRBMY30_{—}2, HGPRBMY30 _{—}3, HGPRBMY41_{—}1, HGPRBMY41_{—}2, HGPRBMY41_{—}3, HGPRBMY42, HGPRBMY42_{—}1, HGPRBMY43, and/or HGPRBMY44 polypeptide or peptide, for example, the HGPRBMY30_{—}1, HGPRBMY30_{—}2, HGPRBMY30_{—}3, HGPRBMY41_{—}1, HGPRBMY41_{—}2, HGPRBMY41_{—}3, HGPRBMY42, HGPRBMY42_{—}1, HGPRBMY43, and/or HGPRBMY44 amino acid sequence as set forth in SEQ ID NOS:2, and measuring an effect of the candidate compound or drug modulator on the biological activity of the HGPRBMY30_{—}1, HGPRBMY30_{—}2, HGPRBMY30_{—}3, HGPRBMY41_{—}1, HGPRBMY41_{—}2, HGPRBMY41_{—}3, HGPRBMY42, HGPRBMY42_{—}1, HGPRBMY43, and/or HGPRBMY44 polypeptide or peptide. Such measurable effects include, for example, physical binding interaction; the ability to cleave a suitable calpain substrate; effects on native and cloned HGPRBMY30_{—}1, HGPRBMY30_{—}2, HGPRBMY30_{—}3, HGPRBMY41_{—}1, HGPRBMY41_{—}2, HGPRBMY41_{—}3, HGPRBMY42, HGPRBMY42_{—}1, HGPRBMY43, and/or HGPRBMY44-expressing cell line; and effects of modulators or other calpain-mediated physiological measures.

[1176] Another method of identifying compounds that modulate the biological activity of the novel HGPRBMY30_{—}1, HGPRBMY30_{—}2, HGPRBMY30_{—}3, HGPRBMY41_{—}1, HGPRBMY41_{—}2, HGPRBMY41_{—}3, HGPRBMY42, HGPRBMY42_{—}1, HGPRBMY43, and/or HGPRBMY44 polypeptides of the present invention comprises combining a potential or candidate compound or drug modulator of a calpain biological activity with a host cell that expresses the HGPRBMY30_{—}1, HGPRBMY30_{—}2, HGPRBMY30_{—}3, HGPRBMY41_{—}1, HGPRBMY41_{—}2, HGPRBMY41_{—}3, HGPRBMY42, HGPRBMY42_{—}1, HGPRBMY43, and/or HGPRBMY44 polypeptide and measuring an effect of the candidate compound or drug modulator on the biological activity of the HGPRBMY30_{—}1, HGPRBMY30_{—}2, HGPRBMY30_{—}3, HGPRBMY41_{—}1, HGPRBMY41_{—}2, HGPRBMY41_{—}3, HGPRBMY42, HGPRBMY42_{—}1, HGPRBMY43, and/or HGPRBMY44 polypeptide. The host cell can also be capable of being induced to express the HGPRBMY30_{—}1, HGPRBMY30_{—}2, HGPRBMY30_{—}3, HGPRBMY41_{—}1, HGPRBMY41_{—}2, HGPRBMY41_{—}3, HGPRBMY42, HGPRBMY42_{—}1, HGPRBMY43, and/or HGPRBMY44 polypeptide, e.g., via inducible expression. Physiological effects of a given modulator candidate on the HGPRBMY30_{—}1, HGPRBMY30_{—}2, HGPRBMY30_{—}3, HGPRBMY41_{—}1, HGPRBMY41_{—}2, HGPRBMY41_{—}3, HGPRBMY42, HGPRBMY42_{—}1, HGPRBMY43, and/or HGPRBMY44 polypeptide can also be measured. Thus, cellular assays for particular calpain modulators may be either direct measurement or quantification of the physical biological activity of the HGPRBMY30_{—}1, HGPRBMY30_{—}2, HGPRBMY30_{—}3, HGPRBMY41_{—}1, HGPRBMY41_{—}2, HGPRBMY41_{—}3, HGPRBMY42, HGPRBMY42_{—}1, HGPRBMY43, and/or HGPRBMY44 polypeptide, or they may be measurement or quantification of a physiological effect. Such methods preferably employ a HGPRBMY30_{—}1, HGPRBMY30_{—}2, HGPRBMY30_{—}3, HGPRBMY41_{—}1, HGPRBMY41_{—}2, HGPRBMY41_{—}3, HGPRBMY42, HGPRBMY42_{—}1, HGPRBMY43, and/or HGPRBMY44 polypeptide as described herein, or an overexpressed recombinant HGPRBMY30_{—}1, HGPRBMY30_{—}2, HGPRBMY30_{—}3, HGPRBMY41_{—}1, HGPRBMY41_{—}2, HGPRBMY41_{—}3, HGPRBMY42, HGPRBMY42_{—}1, HGPRBMY43, and/or HGPRBMY44 polypeptide in suitable host cells containing an expression vector as described herein, wherein the HGPRBMY30_{—}1, HGPRBMY30_{—}2, HGPRBMY30_{—}3, HGPRBMY41_{—}1, HGPRBMY41_{—}2, HGPRBMY41_{—}3, HGPRBMY42, HGPRBMY42_{—}1, HGPRBMY43, and/or HGPRBMY44 polypeptide is expressed, overexpressed, or undergoes upregulated expression.

[1177] Another aspect of the present invention embraces a method of screening for a compound that is capable of modulating the biological activity of a HGPRBMY30_{—}1, HGPRBMY30_{—}2, HGPRBMY30_{—}3, HGPRBMY41_{—}1, HGPRBMY41_{—}2, HGPRBMY41_{—}3, HGPRBMY42, HGPRBMY42_{—}1, HGPRBMY43, and/or HGPRBMY44 polypeptide, comprising providing a host cell containing an expression vector harboring a nucleic acid sequence encoding a HGPRBMY30_{—}1, HGPRBMY30_{—}2, HGPRBMY30_{—}3, HGPRBMY41_{—}1, HGPRBMY41_{—}2, HGPRBMY41_{—}3, HGPRBMY42, HGPRBMY42_{—}1, HGPRBMY43, and/or HGPRBMY44 polypeptide, or a functional peptide or portion thereof (e.g., SEQ ID NOS:2); determining the biological activity of the expressed HGPRBMY30_{—}1, HGPRBMY30_{—}2, HGPRBMY30_{—}3, HGPRBMY41_{—}1, HGPRBMY41_{—}2, HGPRBMY41_{—}3, HGPRBMY42, HGPRBMY42_{—}1, HGPRBMY43, and/or HGPRBMY44 polypeptide in the absence of a modulator compound; contacting the cell with the modulator compound and determining the biological activity of the expressed HGPRBMY30_{—}1, HGPRBMY30_{—}2, HGPRBMY30_{—}3, HGPRBMY41_{—}1, HGPRBMY41_{—}2, HGPRBMY41_{—}3, HGPRBMY42, HGPRBMY42_{—}1, HGPRBMY43, and/or HGPRBMY44 polypeptide in the presence of the modulator compound. In such a method, a difference between the activity of the HGPRBMY30_{—}1, HGPRBMY30_{—}2, HGPRBMY30_{—}3, HGPRBMY41_{—}1, HGPRBMY41_{—}2, HGPRBMY41_{—}3, HGPRBMY42, HGPRBMY42_{—}1, HGPRBMY43, and/or HGPRBMY44 polypeptide in the presence of the modulator compound and in the absence of the modulator compound indicates a modulating effect of the compound.

[1178] Essentially any chemical compound can be employed as a potential modulator or ligand in the assays according to the present invention. Compounds tested as calpain modulators can be any small chemical compound, or biological entity (e.g., protein, sugar, nucleic acid, lipid). Test compounds will typically be small chemical molecules and peptides. Generally, the compounds used as potential modulators can be dissolved in aqueous or organic (e.g., DMSO-based) solutions. The assays are designed to screen large chemical libraries by automating the assay steps and providing compounds from any convenient source. Assays are typically run in parallel, for example, in microtiter formats on microtiter plates in robotic assays. There are many suppliers of chemical compounds, including Sigma (St. Louis, Mo.), Aldrich (St. Louis, Mo.), Sigma-Aldrich (St. Louis, Mo.), Fluka Chemika-Biochemica Analytika (Buchs, Switzerland), for example. Also, compounds may be synthesized by methods known in the art.

[1179] High throughput screening methodologies are particularly envisioned for the detection of modulators of the novel HGPRBMY30_{—}1, HGPRBMY30_{—}2, HGPRBMY30_{—}3, HGPRBMY41_{—}1, HGPRBMY41_{—}2, HGPRBMY41_{—}3, HGPRBMY42, HGPRBMY42_{—}1, HGPRBMY43, and/or HGPRBMY44 polynucleotides and polypeptides described herein. Such high throughput screening methods typically involve providing a combinatorial chemical or peptide library containing a large number of potential therapeutic compounds (e.g., ligand or modulator compounds). Such combinatorial chemical libraries or ligand libraries are then screened in one or more assays to identify those library members (e.g., particular chemical species or subclasses) that display a desired characteristic activity. The compounds so identified can serve as conventional lead compounds, or can themselves be used as potential or actual therapeutics.

[1180] A combinatorial chemical library is a collection of diverse chemical compounds generated either by chemical synthesis or biological synthesis, by combining a number of chemical building blocks (i.e., reagents such as amino acids). As an example, a linear combinatorial library, e.g., a polypeptide or peptide library, is formed by combining a set of chemical building blocks in every possible way for a given compound length (i.e., the number of amino acids in a polypeptide or peptide compound). Millions of chemical compounds can be synthesized through such combinatorial mixing of chemical building blocks.

[1181] The preparation and screening of combinatorial chemical libraries is well known to those having skill in the pertinent art. Combinatorial libraries include, without limitation, peptide libraries (e.g. U.S. Pat. No. 5,010,175; Furka, 1991, Int. J. Pept. Prot. Res., 37:487-493; and Houghton et al., 1991, Nature, 354:84-88). Other chemistries for generating chemical diversity libraries can also be used. Nonlimiting examples of chemical diversity library chemistries include, peptides (PCT Publication No. WO 91/019735), encoded peptides (PCT Publication No. WO 93/20242), random bio-oligomers (PCT Publication No. WO 92/00091), benzodiazepines (U.S. Pat. No. 5,288,514), diversomers such as hydantoins, benzodiazepines and dipeptides (Hobbs et al., 1993, Proc. Natl. Acad. Sci. USA, 90:6909-6913), vinylogous polypeptides (Hagihara et al., 1992, J. Amer. Chem. Soc., 114:6568), nonpeptidal peptidomimetics with glucose scaffolding (Hirschmann et al., 1992, J. Amer. Chem. Soc., 114:9217-9218), analogous organic synthesis of small compound libraries (Chen et al., 1994, J. Amer. Chem. Soc., 116:2661), oligocarbamates (Cho et al., 1993, Science, 261:1303), and/or peptidyl phosphonates (Campbell et al., 1994, J. Org. Chem., 59:658), nucleic acid libraries (see Ausubel, Berger and Sambrook, all supra), peptide nucleic acid libraries (U.S. Pat. No. 5,539,083), antibody libraries (e.g., Vaughn et al., 1996, Nature Biotechnology, 14(3):309-314) and PCT/US96/10287), carbohydrate libraries (e.g., Liang et al., 1996, Science, 274-1520-1522) and U.S. Pat. No. 5,593,853), small organic molecule libraries (e.g., benzodiazepines, Baum C&EN, Jan. 18, 1993, page 33; and U.S. Pat. No. 5,288,514; isoprenoids, U.S. Pat. No. 5,569,588; thiazolidinones and metathiazanones, U.S. Pat. No. 5,549,974; pyrrolidines, U.S. Pat. Nos. 5,525,735 and 5,519,134; morpholino compounds, U.S. Pat. No. 5,506,337; and the like).

[1182] Devices for the preparation of combinatorial libraries are commercially available (e.g., 357 MPS, 390 MPS, Advanced Chem Tech, Louisville Ky.; Symphony, Rainin, Woburn, Mass.; 433A Applied Biosystems, Foster City, Calif.; 9050 Plus, Millipore, Bedford, Mass.). In addition, a large number of combinatorial libraries are commercially available (e.g., ComGenex, Princeton, N.J.; Asinex, Moscow, Russia; Tripos, Inc., St. Louis, Mo.; ChemStar, Ltd., Moscow, Russia; 3D Pharmaceuticals, Exton, Pa.; Martek Biosciences, Columbia, Md., and the like).

[1183] In one embodiment, the invention provides solid phase based in vitro assays in a high throughput format, where the cell or tissue expressing an ion channel is attached to a solid phase substrate. In such high throughput assays, it is possible to screen up to several thousand different modulators or ligands in a single day. In particular, each well of a microtiter plate can be used to perform a separate assay against a selected potential modulator, or, if concentration or incubation time effects are to be observed, every 5-10 wells can test a single modulator. Thus, a single standard microtiter plate can assay about 96 modulators. If 1536 well plates are used, then a single plate can easily assay from about 100 to about 1500 different compounds. It is possible to assay several different plates per day; thus, for example, assay screens for up to about 6,000-20,000 different compounds are possible using the described integrated systems.

[1184] In another of its aspects, the present invention encompasses screening and small molecule (e.g., drug) detection assays which involve the detection or identification of small molecules that can bind to a given protein, i.e., a HGPRBMY30_{—}1, HGPRBMY30_{—}2, HGPRBMY30_{—}3, HGPRBMY41_{—}1, HGPRBMY41_{—}2, HGPRBMY41_{—}3, HGPRBMY42, HGPRBMY42_{—}1, HGPRBMY43, and/or HGPRBMY44 polypeptide or peptide. Particularly preferred are assays suitable for high throughput screening methodologies.

[1185] In such binding-based detection, identification, or screening assays, a functional assay is not typically required. All that is needed is a target protein, preferably substantially purified, and a library or panel of compounds (e.g., ligands, drugs, small molecules) or biological entities to be screened or assayed for binding to the protein target. Preferably, most small molecules that bind to the target protein will modulate activity in some manner, due to preferential, higher affinity binding to functional areas or sites on the protein.

[1186] An example of such an assay is the fluorescence based thermal shift assay (3-Dimensional Pharmaceuticals, Inc., 3DP, Exton, Pa.) as described in U.S. Pat. Nos. 6,020,141 and 6,036,920 to Pantoliano et al.; see also, J. Zimmerman, 2000, Gen. Eng. News, 20(8)). The assay allows the detection of small molecules (e.g., drugs, ligands) that bind to expressed, and preferably purified, ion channel polypeptide based on affinity of binding determinations by analyzing thermal unfolding curves of protein-drug or ligand complexes. The drugs or binding molecules determined by this technique can be further assayed, if desired, by methods, such as those described herein, to determine if the molecules affect or modulate function or activity of the target protein.

[1187] To purify a HGPRBMY30_{—}1, HGPRBMY30_{—}2, HGPRBMY30_{—}3, HGPRBMY41_{—}1, HGPRBMY41_{—}2, HGPRBMY41_{—}3, HGPRBMY42, HGPRBMY42_{—}1, HGPRBMY43, and/or HGPRBMY44 polypeptide or peptide to measure a biological binding or ligand binding activity, the source may be a whole cell lysate that can be prepared by successive freeze-thaw cycles (e.g., one to three) in the presence of standard protease inhibitors. The HGPRBMY30_{—}1, HGPRBMY30_{—}2, HGPRBMY30_{—}3, HGPRBMY41_{—}1, HGPRBMY41_{—}2, HGPRBMY41_{—}3, HGPRBMY42, HGPRBMY42_{—}1, HGPRBMY43, and/or HGPRBMY44 polypeptide may be partially or completely purified by standard protein purification methods, e.g., affinity chromatography using specific antibody described infra, or by ligands specific for an epitope tag engineered into the recombinant HGPRBMY30_{—}1, HGPRBMY30_{—}2, HGPRBMY30_{—}3, HGPRBMY41_{—}1, HGPRBMY41_{—}2, HGPRBMY41_{—}3, HGPRBMY42, HGPRBMY42_{—}1, HGPRBMY43, and/or HGPRBMY44 polypeptide molecule, also as described herein. Binding activity can then be measured as described.

[1188] Compounds which are identified according to the methods provided herein, and which modulate or regulate the biological activity or physiology of the HGPRBMY30_{—}1, HGPRBMY30_{—}2, HGPRBMY30_{—}3, HGPRBMY41_{—}1, HGPRBMY41_{—}2, HGPRBMY41_{—}3, HGPRBMY42, HGPRBMY42_{—}1, HGPRBMY43, and/or HGPRBMY44 polypeptides according to the present invention are a preferred embodiment of this invention. It is contemplated that such modulatory compounds may be employed in treatment and therapeutic methods for treating a condition that is mediated by the novel HGPRBMY30_{—}1, HGPRBMY30_{—}2, HGPRBMY30_{—}3, HGPRBMY41_{—}1, HGPRBMY41_{—}2, HGPRBMY41_{—}3, HGPRBMY42, HGPRBMY42_{—}1, HGPRBMY43, and/or HGPRBMY44 polypeptides by administering to an individual in need of such treatment a therapeutically effective amount of the compound identified by the methods described herein.

[1189] In addition, the present invention provides methods for treating an individual in need of such treatment for a disease, disorder, or condition that is mediated by the HGPRBMY30_{—}1, HGPRBMY30_{—}2, HGPRBMY30_{—}3, HGPRBMY41_{—}1, HGPRBMY41_{—}2, HGPRBMY41_{—}3, HGPRBMY42, HGPRBMY42_{—}1, HGPRBMY43, and/or HGPRBMY44 polypeptides of the invention, comprising administering to the individual a therapeutically effective amount of the HGPRBMY30_{—}1, HGPRBMY30_{—}2, HGPRBMY30_{—}3, HGPRBMY41_{—}1, HGPRBMY41_{—}2, HGPRBMY41_{—}3, HGPRBMY42, HGPRBMY42_{—}1, HGPRBMY43, and/or HGPRBMY44-modulating compound identified by a method provided herein.

[1190] Antisense and Ribozyme (Antagonists)

[1191] In specific embodiments, antagonists according to the present invention are nucleic acids corresponding to the sequences contained in SEQ ID NO:X, or the complementary strand thereof, and/or to nucleotide sequences contained a deposited clone. In one embodiment, antisense sequence is generated internally by the organism, in another embodiment, the antisense sequence is separately administered (see, for example, O'Connor, Neurochem., 56:560 (1991). Oligodeoxynucleotides as Antisense Inhibitors of Gene Expression, CRC Press, Boca Raton, Fla. (1988). Antisense technology can be used to control gene expression through antisense DNA or RNA, or through triple-helix formation. Antisense techniques are discussed for example, in Okano, Neurochem., 56:560 (1991); Oligodeoxynucleotides as Antisense Inhibitors of Gene Expression, CRC Press, Boca Raton, Fla. (1988). Triple helix formation is discussed in, for instance, Lee et al., Nucleic Acids Research, 6:3073 (1979); Cooney et al., Science, 241:456 (1988); and Dervan et al., Science, 251:1300 (1991). The methods are based on binding of a polynucleotide to a complementary DNA or RNA.

[1192] For example, the use of c-myc and c-myb antisense RNA constructs to inhibit the growth of the non-lymphocytic leukemia cell line HL-60 and other cell lines was previously described. (Wickstrom et al. (1988); Anfossi et al. (1989)). These experiments were performed in vitro by incubating cells with the oligoribonucleotide. A similar procedure for in vivo use is described in WO 91/15580. Briefly, a pair of oligonucleotides for a given antisense RNA is produced as follows: A sequence complimentary to the first 15 bases of the open reading frame is flanked by an EcoR1 site on the 5 end and a HindIII site on the 3 end. Next, the pair of oligonucleotides is heated at 90° C. for one minute and then annealed in 2× ligation buffer (20 mM TRIS HCl pH 7.5, 10 mM MgCl2, 10 MM dithiothreitol (DTT) and 0.2 mM ATP) and then ligated to the EcoR1/Hind III site of the retroviral vector PMV7 (WO 91/15580).

[1193] For example, the 5′ coding portion of a polynucleotide that encodes the mature polypeptide of the present invention may be used to design an antisense RNA oligonucleotide of from about 10 to 40 base pairs in length. A DNA oligonucleotide is designed to be complementary to a region of the gene involved in transcription thereby preventing transcription and the production of the receptor. The antisense RNA oligonucleotide hybridizes to the mRNA in vivo and blocks translation of the mRNA molecule into receptor polypeptide.

[1194] In one embodiment, the antisense nucleic acid of the invention is produced intracellularly by transcription from an exogenous sequence. For example, a vector or a portion thereof, is transcribed, producing an antisense nucleic acid (RNA) of the invention. Such a vector would contain a sequence encoding the antisense nucleic acid of the invention. Such a vector can remain episomal or become chromosomally integrated, as long as it can be transcribed to produce the desired antisense RNA. Such vectors can be constructed by recombinant DNA technology methods standard in the art. Vectors can be plasmid, viral, or others known in the art, used for replication and expression in vertebrate cells. Expression of the sequence encoding a polypeptide of the invention, or fragments thereof, can be by any promoter known in the art to act in vertebrate, preferably human cells. Such promoters can be inducible or constitutive. Such promoters include, but are not limited to, the SV40 early promoter region (Bernoist and Chambon, Nature, 29:304-310 (1981), the promoter contained in the 3′ long terminal repeat of Rous sarcoma virus (Yamamoto et al., Cell, 22:787-797 (1980), the herpes thymidine promoter (Wagner et al., Proc. Natl. Acad. Sci. U.S.A., 78:1441-1445 (1981), the regulatory sequences of the metallothionein gene (Brinster et al., Nature, 296:39-42 (1982)), etc.

[1195] The antisense nucleic acids of the invention comprise a sequence complementary to at least a portion of an RNA transcript of a gene of interest. However, absolute complementarity, although preferred, is not required. A sequence “complementary to at least a portion of an RNA” referred to herein, means a sequence having sufficient complementarity to be able to hybridize with the RNA, forming a stable duplex; in the case of double stranded antisense nucleic acids of the invention, a single strand of the duplex DNA may thus be tested, or triplex formation may be assayed. The ability to hybridize will depend on both the degree of complementarity and the length of the antisense nucleic acid Generally, the larger the hybridizing nucleic acid, the more base mismatches with a RNA sequence of the invention it may contain and still form a stable duplex (or triplex as the case may be). One skilled in the art can ascertain a tolerable degree of mismatch by use of standard procedures to determine the melting point of the hybridized complex.

[1196] Antisense oligonucleotides may be single or double stranded. Double stranded RNA's may be designed based upon the teachings of Paddison et al., Proc. Nat. Acad. Sci., 99:1443-1448 (2002); and International Publication Nos. WO 01/29058, and WO 99/32619; which are hereby incorporated herein by reference.

[1197] Oligonucleotides that are complementary to the 5′ end of the message, e.g., the 5′ untranslated sequence up to and including the AUG initiation codon, should work most efficiently at inhibiting translation. However, sequences complementary to the 3′ untranslated sequences of mRNAs have been shown to be effective at inhibiting translation of mRNAs as well. See generally, Wagner, R., Nature, 372:333-335 (1994). Thus, oligonucleotides complementary to either the 5′- or 3′-non-translated, non-coding regions of a polynucleotide sequence of the invention could be used in an antisense approach to inhibit translation of endogenous mRNA. Oligonucleotides complementary to the 5′ untranslated region of the mRNA should include the complement of the AUG start codon. Antisense oligonucleotides complementary to mRNA coding regions are less efficient inhibitors of translation but could be used in accordance with the invention. Whether designed to hybridize to the 5′-, 3′- or coding region of mRNA, antisense nucleic acids should be at least six nucleotides in length, and are preferably oligonucleotides ranging from 6 to about 50 nucleotides in length. In specific aspects the oligonucleotide is at least 10 nucleotides, at least 17 nucleotides, at least 25 nucleotides or at least 50 nucleotides.

[1198] The polynucleotides of the invention can be DNA or RNA or chimeric mixtures or derivatives or modified versions thereof, single-stranded or double-stranded. The oligonucleotide can be modified at the base moiety, sugar moiety, or phosphate backbone, for example, to improve stability of the molecule, hybridization, etc. The oligonucleotide may include other appended groups such as peptides (e.g., for targeting host cell receptors in vivo), or agents facilitating transport across the cell membrane (see, e.g., Letsinger et al., Proc. Natl. Acad. Sci. U.S.A. 86:6553-6556 (1989); Lemaitre et al., Proc. Natl. Acad. Sci., 84:648-652 (1987); PCT Publication NO: WO88/09810, published Dec. 15, 1988) or the blood-brain barrier (see, e.g., PCT Publication NO: WO89/10134, published Apr. 25, 1988), hybridization-triggered cleavage agents. (See, e.g., Krol et al., BioTechniques, 6:958-976 (1988)) or intercalating agents. (See, e.g., Zon, Pharm. Res., 5:539-549 (1988)). To this end, the oligonucleotide may be conjugated to another molecule, e.g., a peptide, hybridization triggered cross-linking agent, transport agent, hybridization-triggered cleavage agent, etc.

[1199] The antisense oligonucleotide may comprise at least one modified base moiety which is selected from the group including, but not limited to, 5-fluorouracil, 5-bromouracil, 5-chlorouracil, 5-iodouracil, hypoxanthine, xanthine, 4-acetylcytosine, 5-(carboxyhydroxylmethyl) uracil, 5-carboxymethylaminomethyl-2-thiouridine, 5-carboxymethylaminomethyluracil, dihydrouracil, beta-D-galactosylqueosine, inosine, N6-isopentenyladenine, 1-methylguanine, 1-methylinosine, 2,2-dimethylguanine, 2-methyladenine, 2-methylguanine, 3-methylcytosine, 5-methylcytosine, N6-adenine, 7-methylguanine, 5-methylaminomethyluracil, 5-methoxyaminomethyl-2-thiouracil, beta-D-mannosylqueosine, 5′-methoxycarboxymethyluracil, 5-methoxyuracil, 2-methylthio-N6-isopentenyladenine, uracil-5-oxyacetic acid (v), wybutoxosine, pseudouracil, queosine, 2-thiocytosine, 5-methyl-2-thiouracil, 2-thiouracil, 4-thiouracil, 5-methyluracil, uracil-5-oxyacetic acid methylester, uracil-5-oxyacetic acid (v), 5-methyl-2-thiouracil, 3-(3-amino-3-N-2-carboxypropyl) uracil, (acp3)w, and 2,6-diaminopurine.

[1200] The antisense oligonucleotide may also comprise at least one modified sugar moiety selected from the group including, but not limited to, arabinose, 2-fluoroarabinose, xylulose, and hexose.

[1201] In yet another embodiment, the antisense oligonucleotide comprises at least one modified phosphate backbone selected from the group including, but not limited to, a phosphorothioate, a phosphorodithioate, a phosphoramidothioate, a phosphoramidate, a phosphordiamidate, a methylphosphonate, an alkyl phosphotriester, and a formacetal or analog thereof.

[1202] In yet another embodiment, the antisense oligonucleotide is an a-anomeric oligonucleotide. An a-anomeric oligonucleotide forms specific double-stranded hybrids with complementary RNA in which, contrary to the usual b-units, the strands run parallel to each other (Gautier et al., Nucl. Acids Res., 15:6625-6641 (1987)). The oligonucleotide is a 2-0-methylribonucleotide (Inoue et al., Nucl. Acids Res., 15:6131-6148 (1987)), or a chimeric RNA-DNA analogue (Inoue et al., FEBS Lett. 215:327-330 (1987)).

[1203] Polynucleotides of the invention may be synthesized by standard methods known in the art, e.g. by use of an automated DNA synthesizer (such as are commercially available from Biosearch, Applied Biosystems, etc.). As examples, phosphorothioate oligonucleotides may be synthesized by the method of Stein et al. (Nucl. Acids Res., 16:3209 (1988)), methylphosphonate oligonucleotides can be prepared by use of controlled pore glass polymer supports (Sarin et al., Proc. Natl. Acad. Sci. U.S.A., 85:7448-7451 (1988)), etc.

[1204] While antisense nucleotides complementary to the coding region sequence of the invention could be used, those complementary to the transcribed untranslated region are most preferred.

[1205] Potential antagonists according to the invention also include catalytic RNA, or a ribozyme (See, e.g., PCT International Publication WO 90/11364, published Oct. 4, 1990; Sarver et al, Science, 247:1222-1225 (1990). While ribozymes that cleave mRNA at site specific recognition sequences can be used to destroy mRNAs corresponding to the polynucleotides of the invention, the use of hammerhead ribozymes is preferred. Hammerhead ribozymes cleave mRNAs at locations dictated by flanking regions that form complementary base pairs with the target mRNA. The sole requirement is that the target mRNA have the following sequence of two bases: 5′-UG-3′. The construction and production of hammerhead ribozymes is well known in the art and is described more fully in Haseloff and Gerlach, Nature, 334:585-591 (1988). There are numerous potential hammerhead ribozyme cleavage sites within each nucleotide sequence disclosed in the sequence listing. Preferably, the ribozyme is engineered so that the cleavage recognition site is located near the 5′ end of the mRNA corresponding to the polynucleotides of the invention; i.e., to increase efficiency and minimize the intracellular accumulation of non-functional mRNA transcripts.

[1206] As in the antisense approach, the ribozymes of the invention can be composed of modified oligonucleotides (e.g. for improved stability, targeting, etc.) and should be delivered to cells which express the polynucleotides of the invention in vivo. DNA constructs encoding the ribozyme may be introduced into the cell in the same manner as described above for the introduction of antisense encoding DNA. A preferred method of delivery involves using a DNA construct “encoding” the ribozyme under the control of a strong constitutive promoter, such as, for example, pol III or pol II promoter, so that transfected cells will produce sufficient quantities of the ribozyme to destroy endogenous messages and inhibit translation. Since ribozymes unlike antisense molecules, are catalytic, a lower intracellular concentration is required for efficiency.

[1207] Antagonist/agonist compounds may be employed to inhibit the cell growth and proliferation effects of the polypeptides of the present invention on neoplastic cells and tissues, i.e. stimulation of angiogenesis of tumors, and, therefore, retard or prevent abnormal cellular growth and proliferation, for example, in tumor formation or growth.

[1208] The antagonist/agonist may also be employed to prevent hyper-vascular diseases, and prevent the proliferation of epithelial lens cells after extracapsular cataract surgery. Prevention of the mitogenic activity of the polypeptides of the present invention may also be desirous in cases such as restenosis after balloon angioplasty.

[1209] The antagonist/agonist may also be employed to prevent the growth of scar tissue during wound healing.

[1210] The antagonist/agonist may also be employed to treat, prevent, and/or diagnose the diseases described herein.

[1211] Thus, the invention provides a method of treating or preventing diseases, disorders, and/or conditions, including but not limited to the diseases, disorders, and/or conditions listed throughout this application, associated with overexpression of a polynucleotide of the present invention by administering to a patient (a) an antisense molecule directed to the polynucleotide of the present invention, and/or (b) a ribozyme directed to the polynucleotide of the present invention.

[1212] Biotic Associations

[1213] A polynucleotide or polypeptide and/or agonist or antagonist of the present invention may increase the organisms ability, either directly or indirectly, to initiate and/or maintain biotic associations with other organisms. Such associations may be symbiotic, nonsymbiotic, endosymbiotic, macrosymbiotic, and/or microsymbiotic in nature. In general, a polynucleotide or polypeptide and/or agonist or antagonist of the present invention may increase the organisms ability to form biotic associations with any member of the fungal, bacterial, lichen, mycorrhizal, cyanobacterial, dinoflaggellate, and/or algal, kingdom, phylums, families, classes, genuses, and/or species.

[1214] The mechanism by which a polynucleotide or polypeptide and/or agonist or antagonist of the present invention may increase the host organisms ability, either directly or indirectly, to initiate and/or maintain biotic associations is variable, though may include, modulating osmolarity to desirable levels for the symbiont, modulating pH to desirable levels for the symbiont, modulating secretions of organic acids, modulating the secretion of specific proteins, phenolic compounds, nutrients, or the increased expression of a protein required for host-biotic organisms interactions (e.g., a receptor, ligand, etc.). Additional mechanisms are known in the art and are encompassed by the invention (see, for example, “Microbial Signalling and Communication”, eds., R. England, G. Hobbs, N. Bainton, and D. McL. Roberts, Cambridge University Press, Cambridge, (1999); which is hereby incorporated herein by reference).

[1215] In an alternative embodiment, a polynucleotide or polypeptide and/or agonist or antagonist of the present invention may decrease the host organisms ability to form biotic associations with another organism, either directly or indirectly. The mechanism by which a polynucleotide or polypeptide and/or agonist or antagonist of the present invention may decrease the host organisms ability, either directly or indirectly, to initiate and/or maintain biotic associations with another organism is variable, though may include, modulating osmolarity to undesirable levels, modulating pH to undesirable levels, modulating secretions of organic acids, modulating the secretion of specific proteins, phenolic compounds, nutrients, or the decreased expression of a protein required for host-biotic organisms interactions (e.g., a receptor, ligand, etc.). Additional mechanisms are known in the art and are encompassed by the invention (see, for example, “Microbial Signalling and Communication”, eds., R. England, G. Hobbs, N. Bainton, and D. McL. Roberts, Cambridge University Press, Cambridge, (1999); which is hereby incorporated herein by reference).

[1216] The hosts ability to maintain biotic associations with a particular pathogen has significant implications for the overall health and fitness of the host. For example, human hosts have symbiosis with enteric bacteria in their gastrointestinal tracts, particularly in the small and large intestine. In fact, bacteria counts in feces of the distal colon often approach 10¹² per milliliter of feces. Examples of bowel flora in the gastrointestinal tract are members of the Enterobacteriaceae, Bacteriodes, in addition to a-hemolytic streptococci, E. coli, Bifobacteria, Anaerobic cocci, Eubacteria, Costridia, lactobacilli, and yeasts. Such bacteria, among other things, assist the host in the assimilation of nutrients by breaking down food stuffs not typically broken down by the hosts digestive system, particularly in the hosts bowel. Therefore, increasing the hosts ability to maintain such a biotic association would help assure proper nutrition for the host.

[1217] Aberrations in the enteric bacterial population of mammals, particularly humans, has been associated with the following disorders: diarrhea, ileus, chronic inflammatory disease, bowel obstruction, duodenal diverticula, biliary calculous disease, and malnutrition. A polynucleotide or polypeptide and/or agonist or antagonist of the present invention are useful for treating, detecting, diagnosing, prognosing, and/or ameliorating, either directly or indirectly, and of the above mentioned diseases and/or disorders associated with aberrant enteric flora population.

[1218] The composition of the intestinal flora, for example, is based upon a variety of factors, which include, but are not limited to, the age, race, diet, malnutrition, gastric acidity, bile salt excretion, gut motility, and immune mechanisms. As a result, the polynucleotides and polypeptides, including agonists, antagonists, and fragments thereof, may modulate the ability of a host to form biotic associations by affecting, directly or indirectly, at least one or more of these factors.

[1219] Although the predominate intestinal flora comprises anaerobic organisms, an underlying percentage represents aerobes (e.g., E. coli). This is significant as such aerobes rapidly become the predominate organisms in intraabdominal infections—effectively becoming opportunistic early in infection pathogenesis. As a result, there is an intrinsic need to control aerobe populations, particularly for immune compromised individuals.

[1220] In a preferred embodiment, a polynucleotides and polypeptides, including agonists, antagonists, and fragments thereof, are useful for inhibiting biotic associations with specific enteric symbiont organisms in an effort to control the population of such organisms.

[1221] Biotic associations occur not only in the gastrointestinal tract, but also on an in the integument. As opposed to the gastrointestinal flora, the cutaneous flora is comprised almost equally with aerobic and anaerobic organisms. Examples of cutaneous flora are members of the gram-positive cocci (e.g., S. aureus, coagulase-negative staphylococci, micrococcus, M.sedentarius), gram-positive bacilli (e.g., Corynebacterium species, C. minutissimum, Brevibacterium species, Propoionibacterium species, P.acnes), gram-negative bacilli (e.g., Acinebacter species), and fungi (Pityrosporum orbiculare). The relatively low number of flora associated with the integument is based upon the inability of many organisms to adhere to the skin. The organisms referenced above have acquired this unique ability. Therefore, the polynucleotides and polypeptides of the present invention may have uses which include modulating the population of the cutaneous flora, either directly or indirectly.

[1222] Aberrations in the cutaneous flora are associated with a number of significant diseases and/or disorders, which include, but are not limited to the following: impetigo, ecthyma, blistering distal dactulitis, pustules, folliculitis, cutaneous abscesses, pitted keratolysis, trichomycosis axcillaris, dermatophytosis complex, axillary odor, erthyrasma, cheesy foot odor, acne, tinea versicolor, seborrheic dermititis, and Pityrosporum folliculitis, to name a few. A polynucleotide or polypeptide and/or agonist or antagonist of the present invention are useful for treating, detecting, diagnosing, prognosing, and/or ameliorating, either directly or indirectly, and of the above mentioned diseases and/or disorders associated with aberrant cutaneous flora population.

[1223] Additional biotic associations, including diseases and disorders associated with the aberrant growth of such associations, are known in the art and are encompassed by the invention. See, for example, “Infectious Disease”, Second Edition, Eds., S. L., Gorbach, J. G., Bartlett, and N. R., Blacklow, W. B. Saunders Company, Philadelphia, (1998); which is hereby incorporated herein by reference).

[1224] Pheromones

[1225] In another embodiment, a polynucleotide or polypeptide and/or agonist or antagonist of the present invention may increase the organisms ability to synthesize and/or release a pheromone. Such a pheromone may, for example, alter the organisms behavior and/or metabolism.

[1226] A polynucleotide or polypeptide and/or agonist or antagonist of the present invention may modulate the biosynthesis and/or release of pheromones, the organisms ability to respond to pheromones (e.g., behaviorally, and/or metabolically), and/or the organisms ability to detect pheromones. Preferably, any of the pheromones, and/or volatiles released from the organism, or induced, by a polynucleotide or polypeptide and/or agonist or antagonist of the invention have behavioral effects the organism.

[1227] Other Activities

[1228] The polypeptide of the present invention, as a result of the ability to stimulate vascular endothelial cell growth, may be employed in treatment for stimulating re-vascularization of ischemic tissues due to various disease conditions such as thrombosis, arteriosclerosis, and other cardiovascular conditions. These polypeptide may also be employed to stimulate angiogenesis and limb regeneration, as discussed above.

[1229] The polypeptide may also be employed for treating wounds due to injuries, burns, post-operative tissue repair, and ulcers since they are mitogenic to various cells of different origins, such as fibroblast cells and skeletal muscle cells, and therefore, facilitate the repair or replacement of damaged or diseased tissue.

[1230] The polypeptide of the present invention may also be employed stimulate neuronal growth and to treat, prevent, and/or diagnose neuronal damage which occurs in certain neuronal disorders or neuro-degenerative conditions such as Alzheimer's disease, Parkinson's disease, and AIDS-related complex. The polypeptide of the invention may have the ability to stimulate chondrocyte growth, therefore, they may be employed to enhance bone and periodontal regeneration and aid in tissue transplants or bone grafts.

[1231] The polypeptides of the present invention may be employed to stimulate growth and differentiation of hematopoietic cells and bone marrow cells when used in combination with other cytokines.

[1232] The polypeptide of the invention may also be employed to maintain organs before transplantation or for supporting cell culture of primary tissues.

[1233] The polypeptide of the present invention may also be employed for inducing tissue of mesodermal origin to differentiate in early embryos.

[1234] The polypeptide or polynucleotides and/or agonist or antagonists of the present invention may also increase or decrease the differentiation or proliferation of embryonic stem cells, besides, as discussed above, hematopoietic lineage.

[1235] The polypeptide or polynucleotides and/or agonist or antagonists of the present invention may also be used to modulate mammalian characteristics, such as body height, weight, hair color, eye color, skin, percentage of adipose tissue, pigmentation, size, and shape (e.g., cosmetic surgery). Similarly, polypeptides or polynucleotides and/or agonist or antagonists of the present invention may be used to modulate mammalian metabolism affecting catabolism, anabolism, processing, utilization, and storage of energy.

[1236] Polypeptide or polynucleotides and/or agonist or antagonists of the present invention may be used to change a mammal's mental state or physical state by influencing biorhythms, caricadic rhythms, depression (including depressive diseases, disorders, and/or conditions), tendency for violence, tolerance for pain, reproductive capabilities (preferably by Activin or Inhibin-like activity), hormonal or endocrine levels, appetite, libido, memory, stress, or other cognitive qualities.

[1237] Polypeptide or polynucleotides and/or agonist or antagonists of the present invention may also be used to prepare individuals for extraterrestrial travel, low gravity environments, prolonged exposure to extraterrestrial radiation levels, low oxygen levels, reduction of metabolic activity, exposure to extraterrestrial pathogens, etc. Such a use may be administered either prior to an extraterrestrial event, during an extraterrestrial event, or both. Moreover, such a use may result in a number of beneficial changes in the recipient, such as, for example, any one of the following, non-limiting, effects: an increased level of hematopoietic cells, particularly red blood cells which would aid the recipient in coping with low oxygen levels; an increased level of B-cells, T-cells, antigen presenting cells, and/or macrophages, which would aid the recipient in coping with exposure to extraterrestrial pathogens, for example; a temporary (i.e., reversible) inhibition of hematopoietic cell production which would aid the recipient in coping with exposure to extraterrestrial radiation levels; increase and/or stability of bone mass which would aid the recipient in coping with low gravity environments; and/or decreased metabolism which would effectively facilitate the recipients ability to prolong their extraterrestrial travel by any one of the following, non-limiting means: (i) aid the recipient by decreasing their basal daily energy requirements; (ii) effectively lower the level of oxidative and/or metabolic stress in recipient (i.e., to enable recipient to cope with increased extraterrestial radiation levels by decreasing the level of internal oxidative/metabolic damage acquired during normal basal energy requirements; and/or (iii) enabling recipient to subsist at a lower metabolic temperature (i.e., cryogenic, and/or sub-cryogenic environment).

[1238] Polypeptide or polynucleotides and/or agonist or antagonists of the present invention may also be used to increase the efficacy of a pharmaceutical composition, either directly or indirectly. Such a use may be administered in simultaneous conjunction with said pharmaceutical, or separately through either the same or different route of administration (e.g., intravenous for the polynucleotide or polypeptide of the present invention, and orally for the pharmaceutical, among others described herein.).

[1239] Polypeptide or polynucleotides and/or agonist or antagonists of the present invention may also be used as a food additive or preservative, such as to increase or decrease storage capabilities, fat content, lipid, protein, carbohydrate, vitamins, minerals, cofactors or other nutritional components.

[1240] Also preferred is a method of treatment of an individual in need of an increased level of a protein activity, which method comprises administering to such an individual a pharmaceutical composition comprising an amount of an isolated polypeptide, polynucleotide, or antibody of the claimed invention effective to increase the level of said protein activity in said individual.

[1241] Having generally described the invention, the same will be more readily understood by reference to the following examples, which are provided by way of illustration and are not intended as limiting.

[1242] References

[1243] F Horn, G Vriend. G protein-coupled receptors in silico. J. Mol. Med. 76: 464-468, 1998.

[1244] Y Feng, C C Broder, P E Kennedy, E A Berger. HIV-1 entry cofactor: functional cDNA cloning of a seven-transmembrane, G protein-coupled receptor. Science 272:872-877, 1996

[1245] F Horn, R Bywater, G Krause, W Kuipers, L Oliveira, A C M Paiva, C Sander, G Vriend. The interaction of class B G protein-coupled receptors and their hormones. Receptors and Channels 5:305-314, 1998

[1246] S F Altschul, T L Madden, A A Schaffer, J Zhang, Z Zhang, W Miller, D J Lipman. Gapped BLAST and PSI-BLAST: a new generation of protein database search programs. Nucleic Acids Res 25:3389-3402, 1997.

[1247] K Hofmann, W Stoffel. TMbase—A database of membrane spanning proteins segments. Biol. Chem. Hoppe-Seyler 347:166, 1993.

### EXAMPLES

### Description of the Preferred Embodiments

### Example 1

### Bioinformatics Analysis

[1248] G-protein coupled receptor sequences were used as probes to search the human genomic sequence database. The GPCR probe sequences were non-olfactory GPCR sequences obtained through the GPCR database at EMBL (http://www.gpcr.org/7tm/). The search program used was gapped BLAST (4). The top genomic exon hits from the BLAST results were searched back against the non-redundant protein and patent sequence databases. From this analysis, exons encoding potential novel GPCRs were identified based on sequence homology. Also, the genomic region surrounding the matching exons were analyzed. Based on this analysis, the potential full-length sequences of several novel human GPCRs were identified, including HGPRBMY30 (also referred to as GPCR99 and GPCR51), HGPRBMY41 (also referred to as GPCR-169), HGPRBMY42 (also referred to as GPCR-148), HGPRBMY43 (also referred to as GPCR96), and HGPRBMY44 (also referred to as GPCR106).

[1249] Specifically, the full-length sequence of HGPRBMY30 was identified using the genomic sequence corresponding to human bac AC026283 and Incyte Template ID: 162271. The full-length polypeptide sequence of is provided as SEQ ID NO:86.

[1250] Analysis of the full-length HGPRBMY30 polynucleotide in addition to the corresponding genomic sequence led to the identification of several predicted splice variants. The full-length polynucleotide and polypeptide sequences of the HGPRBMY30 splice variants are provided in FIGS. 1A-C (HGPRBMY30_{—}1), FIGS. 2A-C (HGPRBMY30_{—}2), and FIGS. 3A-C (HGPRBMY30_{—}3).

[1251] HGPRBMY41_{—}1 was identified using Incyte sequence Template ID: 126510.7. The full-length polynucleotide and polypeptide sequence of HGPRBMY41_{—}1 is provided in FIGS. 4A-B (SEQ ID NO:7).

[1252] Analysis of the full-length HGPRBMY41_{—}1 polynucleotide in addition to the corresponding genomic sequence led to the identification of several predicted splice variants. The full-length polynucleotide and polypeptide sequences of the HGPRBMY41_{—}1 splice variants are provided in FIGS. 5A-B (HGPRBMY41_{—}2), and FIGS. 6A-B (HGPRBMY41_{—}3).

[1253] HGPRBMY42 was identified using the genomic sequence (Genbank Accession No: NT_{—}011719) and Incyte sequence 7474790CB1. The full-length polynucleotide and polypeptide sequence of HGPRBMY42 is provided in FIGS. 7A-B (SEQ ID NO:13).

[1254] Analysis of the full-length HGPRBMY42 polynucleotide in addition to the corresponding genomic sequence led to the identification of a predicted splice variant. The full-length polynucleotide and polypeptide sequences of the HGPRBMY42 splice variant are provided in FIGS. 8A-B (HGPRBMY42_{—}1).

[1255] HGPRBMY43 was identified using the genomic sequence from AC025278 and NT_{—}011145, in addition to Incyte sequence Template ID: 311172. The full-length polynucleotide and polypeptide sequence of HGPRBMY43 is provided in FIGS. 9A-B (SEQ ID NO:17).

[1256] HGPRBMY44, was identified using the genomic sequence from NT_{—}007234, AC053500 and AL354716. The full-length polynucleotide and polypeptide sequence of HGPRBMY44 is provided in FIGS. 10A-D (SEQ ID NO:19).

[1257] The complete protein sequences of HGPRBMY30_{—}1, HGPRBMY30_{—}2, HGPRBMY30_{—}3, HGPRBMY41_{—}1, HGPRBMY41_{—}2, HGPRBMY41_{—}3, HGPRBMY42, HGPRBMY42_{—}1, HGPRBMY43, and/or HGPRBMY44 were analyzed for potential transmembrane domains. TMPRED program (5) was used for transmembrane prediction. The program predicted seven transmembrane domains and the predicted domains match with the predicted transmembrane domains of related GPCRs at the sequence level. The identified transmembrane domains are illustrated in FIGS. 1A-C, FIGS. 2A-C, FIGS. 3A-C, FIGS. 4A-B, FIGS. 5A-B, FIGS. 6A-B, FIGS. 7A-B, FIGS. 8A-B, FIGS. 9A-B, and/or FIGS. 10A-D, and discussed herein.

[1258] The novel GPCRs and splice variants of the present invention were searched against the profiles of GPCR Hidden Markov Models. Profile Hidden Markov Models (profile HMMs) are built from a series of related sequences using Pfam alignments to arrive at a consensus sequence that is representative of the family. The Pfam is a database of multiple alignments of protein domains or conserved protein regions. The alignments provide insight into protein families evolutionary conserved structure, which often has implications for the protein's function. Such Pfams can be very useful for automatically recognizing that a new protein belongs to an existing protein family, even if the homology is weak (A. Bateman, E. Birney, R. Durbin, S. R. Eddy, K. L. Howe, and E. L. L. Sonnhammer. The Pfam Protein Families Database. Nucleic Acids Research, 28:263-266, 2000).

[1259] HGPRBMY30 matched significantly to the Metabotropic Glutamate Family GPCR Pfam model and to the Receptor Family Ligand Binding Region Pfam model (also called as the ANF Receptor Pfam model). The Pfam alignments for the HGPRBMY30_{—}1, HGPRBMY30_{—}2, and HGPRBMY30_{—}3 splice variants are provided in FIGS. 13, 14, and 15.

[1260] HGPRBMY41_{—}1 and splice variants thereof, matched significantly to the Secretin family GPCR Pfam model and to the Latrophilin/CL-1-like GPS domain Pfam model. The Pfam alignments for the HGPRBMY41_{—}1, HGPRBMY41_{—}2, and HGPRBMY41_{—}3 splice variants are provided in FIGS. 20, 21, and 22.

[1261] HGPRBMY42, and splice variant thereof, matched significantly to the Rhodopsin GPCR Pfam model. The Pfam alignments for the HGPRBMY42, and HGPRBMY42_{—}1 splice variant are provided in FIGS. 27, and 28.

[1262] HGPRBMY43 matched significantly to the Secretin family GPCR Pfam model and to the Latrophilin/CL-1-like GPS domain Pfam model. The Pfam alignments for the HGPRBMY43 are provided in FIGS. 32.

[1263] HGPRBMY44 matched significantly to the Metabotropic Glutamate Family GPCR Pfam model and to the Receptor Family Ligand Binding Region Pfam model (also called as the ANF Receptor Pfam model). The Pfam alignments for the HGPRBMY44 are provided in FIGS. 36.

[1264] Based on the sequence, structure, homology to known GPCR signature sequences, and the significant matches to known consensus GPCR sequences, the orphan proteins HGPRBMY30_{—}1, HGPRBMY30_{—}2, HGPRBMY30_{—}3, HGPRBMY41_{—}1, HGPRBMY41_{—}2, HGPRBMY41_{—}3, HGPRBMY42, HGPRBMY42_{—}1, HGPRBMY43, and/or HGPRBMY44 are predicted to represent novel human GPCRs, specifically members of the Secretin family of GPCRs, and/or Metabotropic Glutamate family of GPCRs.

### Example 2

### Method of Constructing a Size Fractionated Brain and Testis cDNA Library

[1265] Poly A⁺ RNA from Clontech is treated with DNase I to remove genomic DNA contamination. The RNA is converted into double stranded cDNA using the SuperScript™ Plasmid System for cDNA Synthesis and Plasmid Cloning (Life Technologies). The cDNA is size fractionated on a TransGenomics HPLC size exclusion column (TosoHass) with dimensions of 7.8 mm×30 cm and a particle size of 10 μtm. Tris buffered saline is used as the mobile phase, and the column is run at a flow rate of 0.5 ml/min. The system is calibrated using a 1 kb ladder to determine which fractions are to be pooled to obtain the largest cDNA library. Generally, fractions that eluted in the range of 12 to 15 minutes are used. The cDNA is precipitated, concentrated and then ligated into the Sal I/Not I sites in pSPORT. Following electroporation of the cDNA into DH12S, DNA from the resulting colonies is prepared and subjected to Sal I/Not I restriction enzyme digestion. Generally, the average insert size of libraries made by this procedure is greater than 3.5 Kb and the overall complexity of the library is greater than 10⁷ independent clones. The library is amplified in semi-solid agar for 2 days at 30 C. An aliquot (200 microliters) of the amplified library is inoculated into a 200 ml culture for single-stranded DNA isolation by super-infection with a fi helper phage. The single-stranded circular DNA is concentrated by ethanol precipitation, resuspended at a concentration of one microgram per microliter and used for the cDNA capture experiments.

### Example 3

### Method of Converting Double Stranded cDNA Libraries into Single Strand Circular Forms

[1266] I. Preparation of Culture.

[1267] LB medium (200 mL+400 ul carb) is inoculated with 0.2 to 1 ml of thawed cDNA library. The culture is incubated, shaking at 250 rpm at 37° C. for 45 min. The optical density of the culture is measured. The OD600 is preferably between 0.025 and 0.040. One mL M13K07 helper phage is added to the culture and grown for 2 hours. At that time, 500 uL Kanamycin (30 mg/mL) is added and incubation continued for 15-18 hours.

[1268] II. Preparation of Cells for Precipitation.

[1269] Cultures are poured into six 50 mL tubes. Cells are centrifuged at 10000 rpm in an HB-6 rotor for 15 minutes at 4° C. The supernatant is retrieved and cells discarded. The supernatant is filtered through a 0.2 um filter. DNase I (12000 units from Gibco) is added and incubated at room temperature for 90 minutes.

[1270] III. PEG Precipitation of DNA.

[1271] Fifty mL of ice-cold 40% PEG 8000, 2.5 M NaCl, 10 mM MgSO₄ is added to the cell pellets. The solution is mixed and distributed into 6 centrifuge tubes and overed with parafilm. The tubes are incubated on wet ice for 1 hour (or at 4° C. overnight).

[1272] Phage are pelleted at 10000 rpm in an HB-6 rotor for 20 minutes at 4° C. The supernatant is discarded and the sides of the tubes wiped dry. The pellets are resuspended in Iml TE, pH 8.

[1273] The resuspended pellets are placed in a 14 mL Sarstedt tube (6 mL total). SDS is added to 0.1% (60 uL of stock 10% SDS). Proteinase K (60 uL of 20 mg/mL) is then added and incubated at 42C for 1 hour.

[1274] DNA is extracted with phenol/chloroform by first adding 1 mL of 5M NaCl followed by an equal volume of phenol/chloroform (6 mL). The mixture is vortexed and centrifuged at 5K in an HB-6 rotor for 5 minutes at 4° C. The aqueous (top) phase is transferred to a new Sarstedt tube. Extractions are repeated until no interface is visible.

[1275] The DNA is precipitated in ethanol by adding 2 volumes of 100% ethanol and precipitating overnight at −20° C. The DNA is centrifuged at 10000 rpm in HB-6 rotor for 20 minutes at 4° C. The ethanol is discarded and the pellets resuspended in 700 uL 70% ethanol. The resuspended pellets are centrifuged at 14000 rpm for 10 minutes at 4° C. The ethanol is discarded and the pellets dried by vacuum.

[1276] Oligosaccharides are then removed by resuspending the pellet in 50 uL TE, pH 8. The solutions are frozen on dry ice for 10 minutes and centrifuged at 14000 rpm for 15 minutes at 4° C. The supernatant is transferred to a new tube and the volume recorded.

[1277] The concentration of DNA is determined by measuring absorbance at 260/280. DNA is diluted 1:100 in a quartz cuvette (3 uL DNA+297 uL TE). The following equation is used to calculate DNA concentration:

[1278] (32 ug/mL*OD)(mL/100 uL)(100)(OD260)=DNA concentration

[1279] The preferred purity ratio is 1.7-2.0.

[1280] The DNA is diluted to 1 ug/uL with TB, pH 8 and stored at 4° C.

[1281] To test the quality of single-stranded DNA (ssDNA) the following reaction mixtures are prepared:

[1282] 1. DNA mix per reaction

[1283] a. 1 uL of 5 ng/uL ssDNA (1:200 dilution of VI.D.2 above)

[1284] b. 11 uL dH2O

[1285] c. 1.5 uL 10 uM T7 SPORT primer (fresh dilution of stock)

[1286] d. 1.5 uL 10× Precision-Taq buffer

[1287] 2. Repair mix per reaction

[1288] a. 4 uL 5 mM dNTPs (1.25 mM each)

[1289] b. 1.5 uL 10× Precision-Taq buffer

[1290] c. 9.25 uL dH2O

[1291] d. 0.25 uL Precision-Taq polymerase

[1292] e. Preheat cocktail at 70° C. until middle of thermal cycle

[1293] The DNA mixes are aliquoted into PCR tubes and thermal cycle carried out as follows:

[1294] 1. 95° C., 20 sec

[1295] 2. 59° C., 1 min; add 15 uL repair mix

[1296] 3. 73° C., 23 min

[1297] Ethanol precipitation of the ssDNA is performed by adding 15 ug glycogen, 16 uL 7.5 M NH₄OAc, 125 uL 100% ethanol. The sample is centrifuged at 14000 rpm for 30 minutes at 4° C. and the pellet washed with 125 uL 70% ethanol. The ethanol is discarded and pellet dried by vacuum. The pellet is resuspended in 10 uL TB, pH 8.

[1298] The DNA is electroporated into DH10B or DH12S cells. A DNA mixture consisting of:

[1299] 1. 2 uL repaired library (=1.0×10-3 ug)

[1300] 2. 1 uL 1 ng/uL unrepaired library (=1.0×10-3 ug)

[1301] 3. 1 uL 0.01 ug/uL pUC19 positive control DNA (=1×10-5 ug)

[1302] is aliquoted to Eppendorf tubes. Cells are thawed on ice-water. Forty uL of cells are added to each DNA aliquot by pipetting into a chilled cuvette placed between metal plates. Electroporation is carried out at 1.8 kV. Immediately following electroporation, 1 mL SOC (SOB+glucose+Mg⁺⁺) media is added to the cuvette, then transferred to a 15 mL tube. Cells are allowed to recover for 1 hr at 37° C. with shaking (225 rpm). Cells are then plated according to the following dilution scheme:

[1303] A. Dilutions of Culture

[1304] 1. Serial dilutions of culture in 1:10 increments (20 uL into 180 uL LB broth)

[1305] 2. Repaired dilutions

[1306] a. 1:100

[1307] b. 1:1K

[1308] c. 1:10K

[1309] 3. Unrepaired dilutions

[1310] a. 1:10

[1311] b. 1:100

[1312] 4. Positive control dilutions

[1313] a. 1:10

[1314] b. 1:100

[1315] 100 uL of each dilution is plated on small LB+carb plates and incubated at 37° C. overnight. Colonies are counted to calculate titer as follows:

[1316] 1. use smallest countable dilution

[1317] 2. (# of colonies)(dilution factor)(200 uL/100 uL)(1000 uL/20 uL)=CFUs

[1318] 3. CFUs/ug DNA used=CFU/ug

[1319] % Background=(unrepaired CFU/ug/repaired CFU/ug)×100%

### Example 4

### Method of Cloning the Novel Human HGPRBMY30_{—}1, HGPRBMY30_{—}2, HGPRBMY30_{—}3, HGPRBMY41_{—}1, HGPRBMY41_{—}2, HGPRBMY41_{—}3, HGPRBMY42, HGPRBMY42_{—}1, HGPRBMY43, and/or HGPRBMY44 G-Protein Coupled Receptors of the Present Invention

[1320] One microliter of anti-sense biotinylated oligos (or sense oligos when annealing to single stranded DNA from pSPORT2 vector), containing one hundred and fifty nanograms of 1 to 50 different 80mer oligo probes, is added to six microliters (six micrograms) of a mixture of up to 15 single-stranded covalently closed circular cDNA libraries and seven microliters of 100% formamide in a 0.5 ml PCR tube. The sequence of the 80 mer oligos used for each of the GPCRs of the present invention are as follows:

| | |
|---|---|
| GPCR Clone | 80mer Cloning Oligo Sequence |

| | |
|---|---|
| HGPRBMY30 | TGCCTTGGCCAGGAACATGAGGCTGGGCTTCATGGCCAC |
| | CACAGGCTCCGAGCACGTATCAAAGAGGTCGTAGCCCA |
| | (SEQ ID NO:99) |
| HGPRBMY41 | TATCACCGTCCACGGCTACTTCCTCATCACCTTCCTCTT |
| | TGGCATGGTGGTCCTGGCCCTGGTGGTCTGGAAGATCTT |
| | CA |
| | (SEQ ID NO:100) |
| HGPRBMY42 | CCCACCCAGTCGTCGTAACAGCAACAGCAACCCTCCTCT |
| | GCCCAGGTGCTACCAGTGCAAAGCTGCTAAAGTGATCTT |
| | CA |
| | (SEQ ID NO:101) |
| HGPRBMY43 | TGACAAGAGAACAAAACATATCTGTGTCTACTGGGAGGG |
| | ATCAGAGGGAGGCCGCTGGTCCACGGAGGGCTGCTCTCA |
| | TG |
| | (SEQ ID NO:102) |
| HGPRBMY44 | GCCAGCACGAGCTTTTTCATTGGAGAACCACAAGACTTC |
| | ACATGTAAAACCAGGCAGACAATGTTTGGAGTGAGCTTT |
| | AC |
| | (SEQ ID NO:103) |

[1321] The mixture is heated in a thermal cycler to 95° C. for 2 min. Fourteen microliters of 2× hybridization buffer (50% formamide, 1.5 M NaCl, 0.04 M NaPO₄, pH 7.2, 5 min EDTA, 0.2% SDS) is added to the heated probe/cDNA library mixture and incubated at 42° C. for 26 hours. Hybrids between the biotinylated oligo and the circular cDNA are isolated by diluting the hybridization mixture to 220 microliters solution containing 1 M NaCl, 10 mm Tris-HCI pH 7.5, 1 mM EDTA, pH 8.0 and adding 125 microliters of streptavidin magnetic beads. This solution is incubated at 42° C. for 60 min, and mixed every 5 min to re-suspend the beads. The beads are separated from the solution with a magnet and washed three times in 200 microliters of 0.1×SSPE,0.1% SDS at 45° C.

[1322] The single stranded cDNA is released from the biotinylated oligo/streptavidin magnetic bead complex by adding 50 microliters of 0.1 N NaOH and incubating at room temperature for 10 min. Six microliters of 3 M sodium acetate is added along with 15 micrograms of glycogen and the solution ethanol precipitated with 120 microliters of 100% ethanol. The precipitated DNA is resuspended in 12 microliters of TB (10 min TrisHCl, pH 8.0), 1 mM EDTA, pH 8.0). The single-stranded cDNA is converted into double-stranded DNA in a thermal cycler by mixing 5 microliters of the captured DNA with 1.5 microliters of 10 micromolar standard SP6 primer for libraries in pSPORT 1 and 2 and 17 primer for libraries in pCMVSPORT and 1.5 microliters of 10×PCR buffer.

[1323] Sequences of primers used to repair single-stranded circular DNA isolated from the primary selection are as follows:

| | | |
|---|---|---|
| T7Sport | 5′-TAATACGACTCACTATAGGG-3′ | (SEQ ID NO:97) |
| SP6Sport | 5′-ATTTAGGTGACACTATAG-3′ | (SEQ ID NO:98) |

[1324] The mixture is heated to 95° C. for 20 seconds and the temperature gradually brought down to 59° C. Fifteen microliters of a repair mix, that was preheated to 70° C. is added to the DNA (repair mix contains 4 microliters of 5 mM dNTPs (1.25 mM each), 1.5 microliters of 10× PCR buffer, 9.25 microliters of water, and 0.25 microliters of Taq polymerase). The solution incubation temperature is raised back to 73° C. and incubated for 23 mm. The repaired DNA is ethanol precipitated and resuspended in 10 microliters of TB. Electroporation is carried out using two microliters DNA per 40 microliters of E. coli DH12S cells. Three hundred and thirty three microliters are plated onto one 150-mm plate of LB agar plus 100 micrograms/milliliter of ampicillin. After overnight incubation at 37° C., the colonies from all plates are harvested by scraping into 10 ml of LB medium+50 micrograms/milliliter of ampicillin and 2 ml of sterile glycerol.

[1325] The second round of selection is initiated by making single-stranded circular DNA from the primary selected library using the method listed above. The purified single-stranded circular DNA is then assayed with gene-specific primers for each of the targeted sequences using standard PCR conditions.

[1326] The sequences of the Gene-Specific-Primer (“GSP”) pairs used to identify the various targeted cDNAs in the primary selected single stranded cDNA libraries are as follows:

| | |
|---|---|
| GPCR Clone | GSP Oligo Sequence |

| | |
|---|---|
| HGPRBMY30-s | AGATCAACAACAAGTCGGATCT |
| | (SEQ ID NO:87) |
| HGPRBMY30-a | TACTGCGTGTAGTTGCAGTAGG |
| | (SEQ ID NO:88) |
| HGPRBMY41-s | GACAACCATGTACGCCCTCT |
| | (SEQ ID NO:89) |
| HGPRBMY41-a | AGCACCTTCTTCCGGTTCTT |
| | (SEQ ID NO:90) |
| HGPRBMY42-s | TCAGTGAGGATGACGTCGAG |
| | (SEQ ID NO:91) |
| HGPRBMY42-a | GCAGGAAGAAAAGCCAGATG |
| | (SEQ ID NO:92) |
| HGPRBMY43-s | TAAACGAAAAGGGATGCAGG |
| | (SEQ ID NO:93) |
| HGPRBMY43-a | TGTAAGAACCGTTGCTGTGC |
| | (SEQ ID NO:94) |
| HGPRBMY44-s | AAATCATCCGGGGGATTAAG |
| | (SEQ ID NO:95) |
| HGPRBMY44-a | GTGTGCAAATGACAACCTGG |
| | (SEQ ID NO:96) |

[1327] The secondary hybridization is carried out using only those 80mer biotinylated probes whose targeted sequences were positive with the GSPs. The resulting single-stranded circular DNA is converted to double strands using the antisense oligo for each target sequence as the repair primer (the sense primer is used for material captured from pSPORT2 libraries. The resulting double stranded DNA is electroporated into DH1OB and the resulting colonies inoculated into 96 deep well blocks. Following overnight growth, DNA is prepared and sequentially screened for each of the targeted sequences using the GSPs. The DNA is also cut with Sal I and Not I and the inserts sized by agarose gel electrophoresis.

[1328] Those cDNA clones that were positive by PCR had the inserts sized and two clones were chosen for DNA sequencing for each gene. All of the clones had identical sequence for each respective gene.

[1329] The full-length nucleotide sequence and the encoded polypeptide for HGPRBMY30_{—}1, HGPRBMY30_{—}2, HGPRBMY30_{—}3, HGPRBMY41_{—}1, HGPRBMY41_{—}2, HGPRBMY41_{—}3, HGPRBMY42, HGPRBMY42_{—}1, HGPRBMY43, and/or HGPRBMY44 are shown in FIGS. 1A-C, FIGS. 2A-C, FIGS. 3A-C, FIGS. 4A-B, FIGS. 5A-B, FIGS. 6A-B, FIGS. 7A-B, FIGS. 8A-B, FIGS. 9A-B, and/or FIGS. 10A-D, respectively.

### Example 5

### Expression Profiling of the Novel Human HGPRBMY30, HGPRBMY41_{—1}, HGPRBMY42, HGPRBMY43, and/or HGPRBMY44 Polypeptide

[1330] The following PCR primer pair was used to measure the steady state levels of HGPRBMY30, HGPRBMY41_{—}1, HGPRBMY42, HGPRBMY43, and/or HGPRBMY44 mRNA by quantitative PCR:

| | |
|---|---|
| GPCR Clone | Expression Profile Oligo Sequence |

| | |
|---|---|
| HGPRBMY30-s | AGATCAACAACAAGTCGGATCT |
| | (SEQ ID NO:87) |
| HGPRBMY30-a | TACTGCGTGTAGTTGCAGTAGG |
| | (SEQ ID NO:88) |
| HGPRBMY41-s | GACAACCATGTACGCCCTCT |
| | (SEQ ID NO:89) |
| HGPRBMY41-a | AGCACCTTCTTCCGGTTCTT |
| | (SEQ ID NO:90) |
| HGPRBMY42-s | TCAGTGAGGATGACGTCGAG |
| | (SEQ ID NO:91) |
| HGPRBMY42-a | GCAGGAAGAAAAGCCAGATG |
| | (SEQ ID NO:92) |
| HGPRBMY43-s | TAAACGAAAAGGGATGCAGG |
| | (SEQ ID NO:93) |
| HGPRBMY43-a | TGTAAGAACCGTTGCTGTGC |
| | (SEQ ID NO:94) |
| HGPRBMY44-s | AAATCATCCGGGGGATTAAG |
| | (SEQ ID NO:95) |
| HGPRBMY44-a | GTGTGCAAATGACAACCTGG |
| | (SEQ ID NO:96) |

[1331] Briefly, first strand cDNA was made from commercially available mRNA. The relative amount of cDNA used in each assay was determined by performing a parallel experiment using a primer pair for a gene expressed in equal amounts in all tissues, cyclophilin. The cyclophilin primer pair detected small variations in the amount of cDNA in each sample and these data were used for normalization of the data obtained with the primer pair for this gene. The PCR data was converted into a relative assessment of the difference in transcript abundance amongst the tissues tested. The expression profiling data for the HGPRBMY30, HGPRBMY41_{—}1, HGPRBMY42, HGPRBMY43, and HGPRBMY44 GPCRs are provided in FIG. 16, FIG. 23, FIG. 29, FIG. 33, and FIG. 37, respectively, and discussed herein.

### Example 6

### Method of Assessing the Expression Profile of the Novel HGPRBMY41_{—}1, HGPRBMY43, and HGPRBMY44 Polypeptides of the Present Invention Using Expanded mRNA Tissue and Cell Sources

[1332] Total RNA from tissues was isolated using the TriZol protocol (Invitrogen) and quantified by determining its absorbance at 260 nM. An assessment of the 18s and 28s ribosomal RNA bands was made by denaturing gel electrophoresis to determine RNA integrity.

[1333] The specific sequence to be measured was aligned with related genes found in GenBank to identity regions of significant sequence divergence to maximize primer and probe specificity. Gene-specific primers and probes were designed using the ABI primer express software to amplify small amplicons (150 base pairs or less) to maximize the likelihood that the primers function at 100% efficiency. All primer/probe sequences were searched against Public Genbank databases to ensure target specificity. Primers and probes were obtained from ABI.

[1334] For HGPRBMY41_{—}1, the primer probe sequences were as follows

| | |
|---|---|
| Forward Primer | |
| 5′-ACCCAGAGGTGTGCATCCA-3′ | (SEQ ID NO:466) |
| Reverse Primer | |
| 5′-GAGTGTGCATTCGGTAGAAAGGA-3′ | (SEQ ID NO:467) |
| TaqMan Probe | |
| 5′-TCCTGTGCAGACGTGTGTACCCCTG-3′ | (SEQ ID NO:468) |

[1335] For HGPRBMY43, the primer probe sequences were as follows

| | |
|---|---|
| Forward Primer | |
| 5′-TCCTCTACCTGGCTTGCTTCA-3′ | (SEQ ID NO:469) |
| Reverse Primer | |
| 5′-AGGTTCCTGACGGTGAGGAA-3′ | (SEQ ID NO:470) |
| TaqMan Probe | |
| 5′-TGCTCCTGGAAGGGCTGCACCT-3′ | (SEQ ID NO:471) |

[1336] For HGPRBMY44, the primer probe sequences were as follows

| | |
|---|---|
| Forward Primer | |
| 5′-TCAGAGAATGGGCCAACAAGA-3′ | (SEQ ID NO:X) |
| Reverse Primer | |
| 5′-TCAGAGAATGGGCCAACAAGA-3′ | (SEQ ID NO:X) |
| TaqMan Probe | |
| 5′-TCAGAGAATGGGCCAACAAGA-3′ | (SEQ ID NO:X) |

[1337] DNA Contamination

[1338] To access the level of contaminating genomic DNA in the RNA, the RNA was divided into 2 aliquots and one half was treated with Rnase-free Dnase (Invitrogen). Samples from both the Dnase-treated and non-treated were then subjected to reverse transcription reactions with (RT+) and without (RT−) the presence of reverse transcriptase. TaqMan assays were carried out with gene-specific primers (see above) and the contribution of genomic DNA to the signal detected was evaluated by comparing the threshold cycles obtained with the RT+/RT− non-Dnase treated RNA to that on the RT+/RT− Dnase treated RNA. The amount of signal contributed by genomic DNA in the Dnased RT− RNA must be less that 10% of that obtained with Dnased RT+ RNA. If not the RNA was not used in actual experiments.

[1339] Reverse Transcription Reaction and Sequence Detection

[1340] 100 ng of Dnase-treated total RNA was annealed to 2.5 μM of the respective gene-specific reverse primer in the presence of 5.5 mM Magnesium Chloride by heating the sample to 72° C. for 2 min and then cooling to 55° C. for 30 min. 1.25 U/μl of MuLv reverse transcriptase and 500 μM of each dNTP was added to the reaction and the tube was incubated at 37° C. for 30 min. The sample was then heated to 90° C. for 5 min to denature enzyme.

[1341] Quantitative sequence detection was carried out on an ABI PRISM 7700 by adding to the reverse transcribed reaction 2.5 μM forward and reverse primers, 2.0 μM of the TaqMan probe, 500 μM of each dNTP, buffer and 5U AmpliTaq Gold™. The PCR reaction was then held at 94° C. for 12 min, followed by 40 cycles of 94° C. for 15 sec and 60° C. for 30 sec.

[1342] Data Handling

[1343] The threshold cycle (Ct) of the lowest expressing tissue (the highest Ct value) was used as the baseline of expression and all other tissues were expressed as the relative abundance to that tissue by calculating the difference in Ct value between the baseline and the other tissues and using it as the exponent in 2^{(ΔCt)}

[1344] The expanded expression profile of the HGPRBMY41_{—}1 polypeptide is provided in FIGS. 39 and 40 and described elsewhere herein.

[1345] The expanded expression profile of the HGPRBMY43 polypeptide is provided in FIG. 41 and described elsewhere herein.

### Example 7

### Functional Characterization of the Novel Human GPCRs, HGPRBMY30_{—}1, HGPRBMY30_{—}2, HGPRBMY30_{—}3, HGPRBMY41_{—}1, HGPRBMY41_{—}2, HGPRBMY41_{—}3, HGPRBMY42, HGPRBMY42_{—}1, HGPRBMY43, and/or HGPRBMY44 of the Present Invention

[1346] The use of mammalian cell reporter assays to demonstrate functional coupling of known GPCRs (G Protein Coupled Receptors) has been well documented in the literature (Gilman, 1987, Boss et al., 1996; Alam & Cook, 1990; George et al., 1997; Selbie & Hill, 1998; Rees et al., 1999). In fact, reporter assays have been successfully used for identifying novel small molecule agonists or antagonists against GPCRs as a class of drug targets (Zlokarnik et al., 1998; George et al., 1997; Boss et al., 1996; Rees et al, 2001). In such reporter assays, a promoter is regulated as a direct consequence of activation of specific signal transduction cascades following agonist binding to a GPCR (Alam & Cook 1990; Selbie & Hill, 1998; Boss et al., 1996; George et al., 1997; Gilman, 1987).

[1347] A number of response element-based reporter systems have been developed that enable the study of GPCR function. These include cAMP response element (CRE)-based reporter genes for G alpha i/o, G alpha s-coupled GPCRs, Nuclear Factor Activator of Transcription (NFAT)-based reporters for G alpha q/11-coupled receptors and MAP kinase reporter genes for use in Galpha i/o coupled receptors (Selbie & Hill, 1998; Boss et al., 1996; George et al., 1997; Gilman, 1987; Rees et al., 2001). Transcriptional response elements that regulate the expression of Beta-Lactamase within a CHO Ki cell line (Cho/NFAT-CRE: Aurora Biosciences™) (Zlokarnik et al., 1998) have been implemented to characterize the function of the orphan HGPRBMY30_{—}1, HGPRBMY30_{—}2, HGPRBMY30_{—}3, HGPRBMY41_{—}1, HGPRBMY41_{—}2, HGPRBMY41_{—}3, HGPRBMY42, HGPRBMY42_{—}1, HGPRBMY43, and/or HGPRBMY44 polypeptides of the present invention. The system enables demonstration of constitutive G-protein coupling to endogenous cellular signaling components upon intracellular overexpression of orphan receptors. Overexpression has been shown to represent a physiologically relevant event. For example, it has been shown that overexpression occurs in nature during metastatic carcinomas, wherein defective expression of the monocyte chemotactic protein 1 receptor, CCR2, in macrophages is associated with the incidence of human ovarian carcinoma (Sica, et al., 2000; Salcedo et al., 2000). Indeed, it has been shown that overproduction of the Beta 2 Adrenergic Receptor in transgenic mice leads to constitutive activation of the receptor signaling pathway such that these mice exhibit increased cardiac output (Kypson et al., 1999; Dorn et al., 1999). These are only a few of the many examples demonstrating constitutive activation of GPCRs whereby many of these receptors are likely to be in the active, R*, conformation (J. Wess 1997).

[1348] Materials and Methods:

[1349] DNA Constructs:

[1350] The putative GPCR HGPRBMY30_{—}1, HGPRBMY30_{—}2, HGPRBMY30_{—}3, HGPRBMY41_{—}1, HGPRBMY41_{—}2, HGPRBMY41_{—}3, HGPRBMY42, HGPRBMY42_{—}1, HGPRBMY43, and/or HGPRBMY44 cDNA may be PCR amplified using PFU™ (Stratagene). The primers used in the PCR reaction are specific to the HGPRBMY30_{—}1, HGPRBMY30_{—}2, HGPRBMY30_{—}3, HGPRBMY41_{—}1, HGPRBMY41_{—}2, HGPRBMY41_{—}3, HGPRBMY42, HGPRBMY42_{—}1, HGPRBMY43, and/or HGPRBMY44 polynucleotides. An appropriate 3 prime primer may be designed so as to add a Flag-tag epitope to the HGPRBMY30_{—}1, HGPRBMY30_{—}2, HGPRBMY30_{—}3, HGPRBMY41_{—}1, HGPRBMY41_{—}2, HGPRBMY41_{—}3, HGPRBMY42, HGPRBMY42_{—}1, HGPRBMY43, and/or HGPRBMY44 polypeptides for immunocytochemistry. The product from the PCR reaction may be isolated from a 0.8% Agarose gel (Invitrogen) and purified using a Gel Extraction Kit™ from Qiagen.

[1351] The purified product may be then digested overnight along with the TM pcDNA3.1 Hygro™ mammalian expression vector from Invitrogen using the HindIII and BamHI restriction enzymes (New England Biolabs). These digested products are then purified using the Gel Extraction Kit™ from Qiagen and subsequently ligated to the pcDNA3.1 Hygro™ expression vector using a DNA molar ratio of 4 parts insert: 1 vector. All DNA modification enzymes are purchased from NEB. The ligation may be incubated overnight at 16 degrees Celsius, after which time, one microliter of the mix may be used to transform DH5 alpha cloning efficiency competent E. coli™ (Gibco BRL). A detailed description of the pcDNA3.1 Hygro™ mammalian expression vector is available at the Invitrogen web site (www.Invitrogen.com). The plasmid DNA from the ampicillin resistant clones are isolated using the Wizard DNA Miniprep System™ from Promega. Positive clones are then confirmed and scaled up for purification using the Qiagen Maxiprep™ plasmid DNA purification kit.

[1352] Cell Line Generation:

[1353] The pcDNA3.1 hygro vector containing the orphan HGPRBMY30_{—}1, HGPRBMY30_{—}2, HGPRBMY30_{—}3, HGPRBMY41_{—}1, HGPRBMY41_{—}2, HGPRBMY41_{—}3, HGPRBMY42, HGPRBMY42_{—}1, HGPRBMY43, and/or HGPRBMY44 cDNA are used to transfect Cho/NFAT-CRE (Aurora Biosciences) cells using Lipofectamine 2000™ according to the manufacturers specifications (Gibco BRL). Two days later, the cells are split 1:3 into selective media (DMEM 11056, 600 ug/ml Hygromycin, 200 ug/ml Zeocin, 10% FBS). All cell culture reagents are purchased from Gibco BRL-Invitrogen.

[1354] The Cho/NFAT-CRE cell lines, transiently or stably transfected with the orphan HGPRBMY30_{—}1, HGPRBMY30_{—}2, HGPRBMY30_{—}3, HGPRBMY41_{—}1, HGPRBMY41_{—}2, HGPRBMY41_{—}3, HGPRBMY42, HGPRBMY42_{—}1, HGPRBMY43, and/or HGPRBMY44 GPCR, are analyzed using the FACS Vantage SE™ (BD), fluorescence microscopy (Nikon), and the LJL Analyst™ (Molecular Devices). In this system, changes in real-time gene expression, as a consequence of constitutive G-protein coupling of the orphan HGPRBMY30_{—}1, HGPRBMY30_{—}2, HGPRBMY30_{—}3, HGPRBMY41_{—}1, HGPRBMY41_{—}2, HGPRBMY41_{—}3, HGPRBMY42, HGPRBMY42_{—}1, HGPRBMY43, and/or HGPRBMY44 GPCR, is examined by analyzing the fluorescence emission of the transformed cells at 447 nm and 518 nm. The changes in gene expression can be visualized using Beta-Lactamase as a reporter, that, when induced by the appropriate signaling cascade, hydrolyzes an intracellularly loaded, membrane-permeant ester, Cephalosporin-Coumarin-Fluorescein-2/Acetoxymethyl™ (CCF2/AM™ Aurora Biosciences; Zlokarnik, et al., 1998). The CCF2/AM™ substrate is a 7-hydroxycoumarin cephalosporin with a fluorescein attached through a stable thioether linkage. Induced expression of the Beta-Lactamase enzyme is readily apparent since each enzyme molecule produced is capable of changing the fluorescence of many CCF2/AM™ substrate molecules. A schematic of this cell based system is shown below.

[chemical structure]

[1355] In summary, CCF2/AM™ is a membrane permeant, intracellularly-trapped, fluorescent substrate with a cephalosporin core that links a 7-hydroxycoumarin to a fluorescein. For the intact molecule, excitation of the coumarin at 409 nm results in Fluorescence Resonance Energy Transfer (FRET) to the fluorescein which emits green light at 518 nm. Production of active Beta-Lactamase results in cleavage of the Beta-Lactam ring, leading to disruption of FRET, and excitation of the coumarin only—thus giving rise to blue fluorescent emission at 447 nm.

[1356] Fluorescent emissions are detected using a Nikon-TE300 microscope equipped with an excitation filter (D405/10X-25), dichroic reflector (430DCLP), and a barrier filter for dual DAPI/FITC (510 nM) to visually capture changes in Beta-Lactamase expression. The FACS Vantage SE is equipped with a Coherent Enterprise II Argon Laser and a Coherent 302C Krypton laser. In flow cytometry, UV excitation at 351-364 nm from the Argon Laser or violet excitation at 407 nm from the Krypton laser are used. The optical filters on the FACS Vantage SE are HQ460/50 m and HQ535/40 m bandpass separated by a 490 dichroic mirror.

[1357] Prior to analyzing the fluorescent emissions from the cell lines as described above, the cells are loaded with the CCF2/AM substrate. A 6× CCF2/AM loading buffer may be prepared whereby 1 mM CCF2/AM (Aurora Biosciences) may be dissolved in 100% DMSO (Sigma). 12 ul of this stock solution may be added to 60 ul of 100 mg/ml Pluronic F127 (Sigma) in DMSO containing 0.1% Acetic Acid (Sigma). This solution may be added while vortexing to 1 mL of Sort Buffer (PBS minus calcium and magnesium-Gibco-25 mM HEPES-Gibco- pH 7.4, 0.1% BSA). Cells are placed in serum-free media and the 6× CCF2/AM may be added to a final concentration of 1×. The cells are then loaded at room temperature for one to two hours, and then subjected to fluorescent emission analysis as described herein. Additional details relative to the cell loading methods and/or instrument settings may be found by reference to the following publications: see Zlokarnik, et al., 1998; Whitney et al., 1998; and BD Biosciences,1999.

[1358] Immunocytochemistry:

[1359] The cell lines transfected and selected for expression of Flag-epitope tagged orphan GPCRs are analyzed by immunocytochemistry. The cells are plated at 1×10\hat{ }3 in each well of a glass slide (VWR). The cells are rinsed with PBS followed by acid fixation for 30 minutes at room temperature using a mixture of 5% Glacial Acetic Acid/90% ETOH. The cells are then blocked in 2% BSA and 0.1% Triton in PBS, incubated for 2 h at room temperature or overnight at 4° C. A monoclonal anti-Flag FITC antibody may be diluted at 1:50 in blocking solution and incubated with the cells for 2 h at room temperature. Cells are then may behed three times with 0.1% Triton in PBS for five minutes. The slides are overlayed with mounting media dropwise with Biomedia—Gel Mount™ (Biomedia; Containing Anti-Quenching Agent). Cells are examined at 10× magnification using the Nikon TE300 equiped with FITC filter (535 nm).

[1360] Demonstration of Cell Surface Expression:

[1361] HGPRBMY30_{—}1, HGPRBMY30_{—}2, HGPRBMY30_{—}3, HGPRBMY41_{—}1, HGPRBMY41_{—}2, HGPRBMY41_{—}3, HGPRBMY42, HGPRBMY42_{—}1, HGPRBMY43, and/or HGPRBMY44 may be tagged at the C-terminus using the Flag epitope and inserted into the pcDNA3.1 hygro™ expression vector, as described herein. Immunocytochemistry of Cho Nfat-CRE cell lines transfected with the Flag-tagged HGPRBMY301, HGPRBMY30_{—}2, HGPRBMY30_{—}3, HGPRBMY41_{—}1, HGPRBMY41_{—}2, HGPRBMY41_{—}3, HGPRBMY42, HGPRBMY42_{—}1, HGPRBMY43, and/or HGPRBMY44 construct with FITC conjugated Anti Flag monoclonal antibody demonstrated that HGPRBMY30_{—}1, HGPRBMY30_{—}2, HGPRBMY30_{—}3, HGPRBMY41_{—}1, HGPRBMY41_{—}2, HGPRBMY41_{—}3, HGPRBMY42, HGPRBMY42_{—}1, HGPRBMY43, and/or HGPRBMY44 is indeed a cell surface receptor. The immunocytochemistry also confirmed expression of the HGPRBMY30_{—}1, HGPRBMY30_{—}2, HGPRBMY30_{—}3, HGPRBMY41_{—}1, HGPRBMY41_{—}2, HGPRBMY41_{—}3, HGPRBMY42, HGPRBMY42_{—}1, HGPRBMY43, and/or HGPRBMY44 in the Cho Nfat-CRE cell lines. Briefly, Cho Nfat-CRE cell lines are transfected with pcDNA3.1 hygro T™/HGPRBMY30_{—}1, HGPRBMY30_{—}2, HGPRBMY30_{—}3, HGPRBMY41_{—}1, HGPRBMY41_{—}2, HGPRBMY41_{—}3, HGPRBMY42, HGPRBMY42_{—}1, HGPRBMY43, and/or HGPRBMY44-Flag vector, fixed with 70% methanol, and permeablized with 0.1% TritonX100. The cells are then blocked with 1% Serum and incubated with a FITC conjugated Anti Flag monoclonal antibody at 1:50 dilution in PBS-Triton. The cells are then may behed several times with PBS-Triton, overlayed with mounting solution, and fluorescent images are captured. The control cell line, non-transfected ChoNfat CRE cell line, exhibited no detectable background fluorescence. Plasma membrane localization would be consistent with HGPRBMY30_{—}1, HGPRBMY30_{—}2, HGPRBMY30_{—}3, HGPRBMY41_{—}1, HGPRBMY41_{—}2, HGPRBMY41_{—}3, HGPRBMY42, HGPRBMY42_{—}1, HGPRBMY43, and/or HGPRBMY44 representing a 7 transmembrane domain containing GPCR.

[1362] Screening Paradigm

[1363] The Aurora Beta-Lactamase technology provides a clear path for identifying agonists and antagonists of the HGPRBMY30_{—}1, HGPRBMY30_{—}2, HGPRBMY30_{—}3, HGPRBMY41_{—}1, HGPRBMY41_{—}2, HGPRBMY41_{—}3, HGPRBMY42, HGPRBMY42_{—}1, HGPRBMY43, and/or HGPRBMY44 polypeptides. Cell lines that exhibit a range of constitutive coupling activity may be identified by sorting through HGPRBMY30_{—}1, HGPRBMY30_{—}2, HGPRBMY30_{—}3, HGPRBMY41_{—}1, HGPRBMY41_{—}2, HGPRBMY41_{—}3, HGPRBMY42, HGPRBMY42_{—}1, HGPRBMY43, and/or HGPRBMY44 transfected cell lines using the FACS Vantage SE. For example, cell lines that exhibit an intermediate coupling response, using the LJL analyst, would provide the opportunity to screen, indirectly, for both agonists and antogonists of HGPRBMY30_{—}1, HGPRBMY30_{—}2, HGPRBMY30_{—}3, HGPRBMY41_{—}1, HGPRBMY41_{—}2, HGPRBMY41_{—}3, HGPRBMY42, HGPRBMY42_{—}1, HGPRBMY43, and/or HGPRBMY44 by looking for inhibitors that block the beta lactamase response, or agonists that increase the beta lactamase response. As described herein, modulating the expression level of beta lactamase directly correlates with the level of cleaved CCR2 substrate. For example, this screening paradigm has been shown to work for the identification of modulators of a known GPCR, 5HT6, that couples through Adenylate Cyclase, in addition to, the identification of modulators of the 5HT2c GPCR, that couples through changes in [Ca²⁺]i. HGPRBMY30_{—}1, HGPRBMY30_{—}2, HGPRBMY30_{—}3, HGPRBMY41_{—}1, HGPRBMY41_{—}2, HGPRBMY41_{—}3, HGPRBMY42, HGPRBMY42_{—}1, HGPRBMY43, and/or HGPRBMY44 modulator screens may be carried out using a variety of high throughput methods known in the art, though preferably using the fully automated Aurora UHTSS system.

[1364] In preferred embodiments, the HGPRBMY30_{—}1, HGPRBMY30_{—}2, HGPRBMY30_{—}3, HGPRBMY41_{—}1, HGPRBMY41_{—}2, HGPRBMY41_{—}3, HGPRBMY42, HGPRBMY42_{—}1, HGPRBMY43, and/or HGPRBMY44 transfected Cho Nfat-CRE cell lines of the present invention are useful for the identification of agonists and antagonists of the HGPRBMY30_{—}1, HGPRBMY30_{—}2, HGPRBMY30_{—}3, HGPRBMY41_{—}1, HGPRBMY41_{—}2, HGPRBMY41_{—}3, HGPRBMY42, HGPRBMY42_{—}1, HGPRBMY43, and/or HGPRBMY44 polypeptides. Representative uses of these cell lines would be their inclusion in a method of identifying HGPRBMY30_{—}1, HGPRBMY30_{—}2, HGPRBMY30_{—}3, HGPRBMY41_{—}1, HGPRBMY41_{—}2, HGPRBMY41_{—}3, HGPRBMY42, HGPRBMY42_{—}1, HGPRBMY43, and/or HGPRBMY44 agonists and antagonists. Preferably, the cell lines are useful in a method for identifying a compound that modulates the biological activity of the HGPRBMY30_{—}1, HGPRBMY30_{—}2, HGPRBMY30_{—}3, HGPRBMY41_{—}1, HGPRBMY41_{—}2, HGPRBMY41_{—}3, HGPRBMY42, HGPRBMY42_{—}1, HGPRBMY43, and/or HGPRBMY44 polypeptides, comprising the steps of (a) combining a candidate modulator compound with a host cell expressing the HGPRBMY30_{—}1, HGPRBMY30_{—}2, HGPRBMY30_{—}3, HGPRBMY41_{—}1, HGPRBMY41_{—}2, HGPRBMY41_{—}3, HGPRBMY42, HGPRBMY42_{—}1, HGPRBMY43, and/or HGPRBMY44 polypeptides having the sequence as set forth in SEQ ID NO:2; and (b) measuring an effect of the candidate modulator compound on the activity of the expressed HGPRBMY30_{—}1, HGPRBMY30_{—}2, HGPRBMY30_{—}3, HGPRBMY41_{—}1, HGPRBMY41_{—}2, HGPRBMY41_{—}3, HGPRBMY42, HGPRBMY42_{—}1, HGPRBMY43, and/or HGPRBMY44 polypeptides. Representative vectors expressing the HGPRBMY30_{—}1, HGPRBMY30_{—}2, HGPRBMY30_{—}3, HGPRBMY41_{—}1, HGPRBMY41_{—}2, HGPRBMY41_{—}3, HGPRBMY42, HGPRBMY42_{—}1, HGPRBMY43, and/or HGPRBMY44 polypeptides are referenced herein (e.g., pcDNA3.1 hygro™) or otherwise known in the art.

[1365] The cell lines are also useful in a method of screening for a compound that is capable of modulating the biological activity of HGPRBMY30_{—}1, HGPRBMY30_{—}2, HGPRBMY30_{—}3, HGPRBMY41_{—}1, HGPRBMY41_{—}2, HGPRBMY41_{—}3, HGPRBMY42, HGPRBMY42_{—}1, HGPRBMY43, and/or HGPRBMY44 polypeptides, comprising the steps of: (a) determining the biological activity of the HGPRBMY30_{—}1, HGPRBMY30_{—}2, HGPRBMY30_{—}3, HGPRBMY41_{—}1, HGPRBMY41_{—}2, HGPRBMY41_{—}3, HGPRBMY42, HGPRBMY42_{—}1, HGPRBMY43, and/or HGPRBMY44 polypeptides in the absence of a modulator compound; (b) contacting a host cell expression the HGPRBMY30_{—}1, HGPRBMY30_{—}2, HGPRBMY30_{—}3, HGPRBMY41_{—}1, HGPRBMY41_{—}2, HGPRBMY41_{—}3, HGPRBMY42, HGPRBMY42_{—}1, HGPRBMY43, and/or HGPRBMY44 polypeptides with the modulator compound; and (c) determining the biological activity of the HGPRBMY30_{—}1, HGPRBMY30_{—}2, HGPRBMY30_{—}3, HGPRBMY41_{—}1, HGPRBMY41_{—}2, HGPRBMY41_{—}3, HGPRBMY42, HGPRBMY42_{—}1, HGPRBMY43, and/or HGPRBMY44 polypeptides in the presence of the modulator compound; wherein a difference between the activity of the HGPRBMY30_{—}1, HGPRBMY30_{—}2, HGPRBMY30_{—}3, HGPRBMY41_{—}1, HGPRBMY412, HGPRBMY41_{—}3, HGPRBMY42, HGPRBMY42_{—}1, HGPRBMY43, and/or HGPRBMY44 polypeptides in the presence of the modulator compound and in the absence of the modulator compound indicates a modulating effect of the compound. Additional uses for these cell lines are described herein or otherwise known in the art.

[1366] 1. Rees, S., Brown, S., Stables, J.: Reporter gene systems for the study of G Protein Coupled Receptor signalling in mammalian cells. In Milligan G. (ed.): Signal Transduction: A practical approach. Oxford: Oxford University Press, 1999: 171-221.

[1367] 2. Alam, J., Cook, J. L.: Reporter Genes: Application to the study of mammalian gene transcription. Anal. Biochem. 1990; 188: 245-254.

[1368] 3. Selbie, L. A. and Hill, S. J.: G protein-coupled receptor cross-talk: The fine-tuning of multiple receptor-signaling pathways. TiPs. 1998; 19: 87-93.

[1369] 4. Boss, V., Talpade, D. J., and Murphy, T. J.: Induction of NFAT mediated transcription by Gq-coupled Receptors in lympoid and non-lymphoid cells. JBC. 1996; 271: 10429-10432.

[1370] 5. George, S. E., Bungay, B. J., and Naylor, L. H.: Functional coupling of endogenous serotonin (5-HT1B) and calcitonin (C1a) receptors in Cho cells to a cyclic AMP-responsive luciferase reporter gene. J. Neurochem. 1997; 69: 1278-1285.

[1371] 6. Suto, C M, Igna D M: Selection of an optimal reporter for cell-based high throughput screening assays. J. Biomol. Screening. 1997; 2: 7-12.

[1372] 7. Zlokarnik, G., Negulescu, P. A ., Knapp, T. E., More, L., Burres, N., Feng, L., Whitney, M., Roemer, K., and Tsien, R. Y. Quantitation of transcription and clonal selection of single living cells with a B-Lactamase Reporter. Science. 1998; 279: 84-88.

[1373] 8. S. Fiering et. al., Genes Dev. 4, 1823 (1990).

[1374] 9. J. Karttunen and N. Shastri, PNAS 88, 3972 (1991).

[1375] 10. Hawes, B. E., Luttrell. L. M., van Biesen, T., and Lefkowitz, R. J. (1996) JBC 271, 12133-12136.

[1376] 11. Gilman, A. G. (1987) Annul. Rev. Biochem. 56, 615-649.

[1377] 12. Maniatis et al.,

[1378] 13. Salcedo, R., Ponce, M. L., Young, H. A., May beserman, K., Ward, J. M., Kleinman, H. K., Oppenheim, J. J., Murphy, W. J. Human endothelial cells express CCR2 and respond to MCP-1: direct role of MCP-1 in angiogenesis and tumor progression. Blood. 2000; 96 (1): 34-40.

[1379] 14. Sica, A., Saccani, A., Bottazzi, B., Bernasconi, S., Allavena, P., Gaetano, B., LaRossa, G., Scotton, C., Balkwill F., Mantovani, A. Defective expression of the monocyte chemotactic protein 1 receptor CCR2 in macrophages associated with human ovarian carcinoma. J. Immunology. 2000; 164: 733-8.

[1380] 15. Kypson, A., Hendrickson, S., Akhter, S., Wilson, K., McDonald, P., Lilly, R., Dolber, P., Glower, D., Lefkowitz, R., Koch, W. Adenovirus-mediated gene transfer of the B2 AR to donor hearts enhances cardiac function. Gene Therapy. 1999; 6: 1298-304.

[1381] 16. Dorn, G. W., Tepe, N. M., Lorenz, J. N., Kock, W. J., Ligget, S. B. Low and high level transgenic expression of B2AR differentially affect cardiac hypertrophy and function in Galpha q-overexpressing mice. PNAS. 1999; 96: 6400-5.

[1382] 17. J. Wess. G protein coupled receptor: molecular mechanisms involved in receptor activation and selectivity of G-protein recognition.

[1383] 18. Whitney, M, Rockenstein, E, Cantin, G., Knapp, T., Zlokamik, G., Sanders, P., Durick, K., Craig, F. F., and Negulescu, P. A. A genome-wide functional assay of signal transduction in living mammalian cells. 1998. Nature Biotech. 16: 1329-1333.

[1384] 19. BD Biosciences: FACS Vantage SE Training Manual. Part Number 11-11020-00 Rev. A. August 1999.

[1385] 20. Chen, G., Jaywickreme, C., Way, J., Armour S., Queen K., Watson., C., Ignar, D., Chen, W. J., Kenakin, T. Constitutive Receptor systems for drug discovery. J. Pharmacol. Toxicol. Methods 1999; 42: 199-206.

### Example 8

### Method of Assessing the Ability of HGPRBMY30_{—}1, HGPRBMY30_{—}2, HGPRBMY30_{—}3, HGPRBMY41_{—}1, HGPRBMY41_{—}2, HGPRBMY41_{—}3, HGPRBMY42, HGPRBMY42_{—}1, HGPRBMY43, and/or HGPRBMY44 to Serve as a GPCR Receptor

[1386] The activity of the HGPRBMY30_{—}1, HGPRBMY30_{—}2, HGPRBMY30_{—}3, HGPRBMY41_{—}1, HGPRBMY41_{—}2, HGPRBMY41_{—}3, HGPRBMY42, HGPRBMY42_{—}1, HGPRBMY43, and/or HGPRBMY44 polypeptides may be measured using an assay based upon the property of some known GPCRs to support proliferation in vitro of fibroblasts and tumor cells under serum-free conditions (Chiquet Ehrismann, R. et al. (1986) Cell 47: 131-139). Briefly, wells in 96 well cluster plates (Falcon, Fisher Scientific, Santa Clara Calif.) are coated with HGPRBMY30_{—}1, HGPRBMY30_{—}2, HGPRBMY30_{—}3, HGPRBMY41_{—}1, HGPRBMY41_{—}2, HGPRBMY41_{—}3, HGPRBMY42, HGPRBMY42_{—}1, HGPRBMY43, and/or HGPRBMY44 polypeptides by incubation with solutions at 50-100 Rg/ml for 15 min at ambient temperature. The coating solution is aspirated, and the wells washed with Dulbecco's medium before cells are plated. Rat fibroblast cultures or rat mammary tumor cells are prepared as described and plated at a density of 104-105 cells/ml in Dulbecco's medium supplemented with 10% fetal calf serum (FCS).

[1387] After three days the media are removed, and the cells washed three times with phosphatebuffered saline (PBS) before the addition of serum-free Dulbecco's medium containing 0.25 mg/ml bovine serum albumin (BSA, Fraction V, Sigma Chemical, St. Louis, Mo.). After 2 days the medium is aspirated, and 100 il of [3H] thymidine (NEN) at 2 IlCi/ml in fresh Dulbecco's medium containing 0.25 mg/ml BSA added. Parallel plates are fixed and stained to determine cell numbers. After 16 hr, the medium is aspirated, the cell layer washed with PBS, and the 10% trichloroacetic acid-precipitable counts in the cell layer determined by liquid scintillation counting of radioisotope (normalized to relative cell numbers; Chiquet-Ehrismann, R. et al. (1986) supra). The rates of cell proliferation and [3H] thymidine uptake are proportional to the levels of GCRP in the sample.

[1388] Alternatively, the assay for HGPRBMY30_{—}1, HGPRBMY30_{—}2, HGPRBMY30_{—}3, HGPRBMY41_{—}1, HGPRBMY41_{—}2, HGPRBMY41_{—}3, HGPRBMY42, HGPRBMY42_{—}1, HGPRBMY43, and/or HGPRBMY44 polypeptide activity is based upon the property of CD97/Emrl GPCR family proteins to modulate G protein-activated second messenger signal transduction pathways (e. g., cAMP; Gaudin, P. et al. (1998) J. Biol. Chem. 273: 4990-4996). A plasmid encoding the full length HGPRBMY30_{—}1, HGPRBMY30_{—}2, HGPRBMY30_{—}3, HGPRBMY41_{—}1, HGPRBMY41_{—}2, HGPRBMY41_{—}3, HGPRBMY42, HGPRBMY42_{—}1, HGPRBMY43, and/or HGPRBMY44 polypeptide is transfected into a mammalian cell line (e. g., COS-7 or Chinese hamster ovary (CHO-K1) cell lines) using methods well-known in the art. Transfected cells are grown in 12-well trays in culture medium containing 2% FCS for 48 hours, the culture medium is discarded, then the attached cells are gently washed with PBS. The cells are then incubated in culture medium with 10% FCS or 2% FCS for 30 minutes, then the medium is removed and cells lysed by treatment with 1 M perchloric acid. The cAMP levels in the lysate are measured by radioimmunoassay using methods well-known in the art. Changes in the levels of cAMP in the lysate from 10% FCS-treated cells compared with those in 2% FCS-treated cells are proportional to the amount of the HGPRBMY30_{—}1, HGPRBMY30_{—}2, HGPRBMY30_{—}3, HGPRBMY41_{—}1, HGPRBMY41_{—}2, HGPRBMY41_{—}3, HGPRBMY42, HGPRBMY42_{—}1, HGPRBMY43, and/or HGPRBMY44 polypeptide present in the transfected cells.

### Example 9

### Method of Assessing the Physiological Function of the HGPRBMY30_{—}1, HGPRBMY30_{—}2, HGPRBMY30_{—}3, HGPRBMY41_{—}1, HGPRBMY41_{—}2, HGPRBMY41_{—}3, HGPRBMY42, HGPRBMY42_{—}1, HGPRBMY43, and/or HGPRBMY44 Polypeptide at the Cellular Level

[1389] The physiological function of the HGPRBMY30_{—}1, HGPRBMY30_{—}2, HGPRBMY30_{—}3, HGPRBMY41_{—}1, HGPRBMY41_{—}2, HGPRBMY41_{—}3, HGPRBMY42, HGPRBMY42_{—}1, HGPRBMY43, and/or HGPRBMY44 polypeptide may be assessed by expressing the sequences encoding HGPRBMY30_{—}1, HGPRBMY30_{—}2, HGPRBMY30_{—}3, HGPRBMY41_{—}1, HGPRBMY41_{—}2, HGPRBMY41_{—}3, HGPRBMY42, HGPRBMY42_{—}1, HGPRBMY43, and/or HGPRBMY44 at physiologically elevated levels in mammalian cell culture systems. cDNA is subcloned into a mammalian expression vector containing a strong promoter that drives high levels of cDNA expression (examples are provided elsewhere herein). Vectors of choice include pCMV SPORT (Life Technologies) and pCR3.1 (Invitrogen, Carlsbad Calif.), both of which contain the cytomegalovirus promoter. 5-10, ug of recombinant vector are transiently transfected into a human cell line, preferably of endothelial or hematopoietic origin, using either liposome formulations or electroporation. 1-2 ug of an additional plasmid containing sequences encoding a marker protein are cotransfected. Expression of a marker protein provides a means to distinguish transfected cells from nontransfected cells and is a reliable predictor of cDNA expression from the recombinant vector. Marker proteins of choice include, e.g., Green Fluorescent Protein (GFP; Clontech), CD64, or a CD64-GFP fusion protein. Flow cytometry (FCM), an automated, laser optics-based technique, is used to identify transfected cells expressing GFP or CD64-GFP and to evaluate the apoptotic state of the cells and other cellular properties. FCM detects and quantifies the uptake of fluorescent molecules that diagnose events preceding or coincident with cell death. These events include changes in nuclear DNA content as measured by staining of DNA with propidium iodide; changes in cell size and granularity as measured by forward light scatter and 90 degree side light scatter; down-regulation of DNA synthesis as measured by decrease in bromodeoxyuridine uptake; alterations in expression of cell surface and intracellular proteins as measured by reactivity with specific antibodies; and alterations in plasma membrane composition as measured by the binding of fluorescein-conjugated Annexin V protein to the cell surface. Methods in flow cytometry are discussed in Ormerod, M. G. (1994) Flow Cytometry, Oxford, New York N.Y.

[1390] The influence of HGPRBMY30_{—}1, HGPRBMY30_{—}2, HGPRBMY30_{—}3, HGPRBMY41_{—}1, HGPRBMY41_{—}2, HGPRBMY41_{—}3, HGPRBMY42, HGPRBMY42_{—}1, HGPRBMY43, and/or HGPRBMY44 polypeptides on gene expression can be assessed using highly purified populations of cells transfected with sequences encoding HGPRBMY30_{—}1, HGPRBMY30_{—}2, HGPRBMY30_{—}3, HGPRBMY41_{—}1, HGPRBMY41_{—}2, HGPRBMY41_{—}3, HGPRBMY42, HGPRBMY42_{—}1, HGPRBMY43, and/or HGPRBMY44 and either CD64 or CD64-GFP. CD64 and CD64-GFP are expressed on the surface of transfected cells and bind to conserved regions of human immunoglobulin G (IgG). Transfected cells are efficiently separated from nontransfected cells using magnetic beads coated with either human IgG or antibody against CD64 (DYNAL, Lake Success N.Y.). mRNA can be purified from the cells using methods well known by those of skill in the art. Expression of mRNA encoding HGPRBMY30_{—}1, HGPRBMY30_{—}2, HGPRBMY30_{—}3, HGPRBMY41_{—}1, HGPRBMY41_{—}2, HGPRBMY41_{—}3, HGPRBMY42, HGPRBMY42_{—}1, HGPRBMY43, and/or HGPRBMY44 polypeptides and other genes of interest can be analyzed by northern analysis or microarray techniques.

### Example 10

### Method of Assessing the Physiological Function of the HGPRBMY30_{—}1, HGPRBMY30_{—}2, HGPRBMY30_{—}3, HGPRBMY41_{—}1, HGPRBMY41_{—}2, HGPRBMY41_{—}3 HGPRBMY42, HGPRBMY42_{—}1 HGPRBMY43, and/or HGPRBMY44 Polypeptides in Xenopus Oocytes

[1391] Capped RNA transcripts from linearized plasmid templates encoding the receptor cDNAs of the invention are synthesized in vitro with RNA polymerases in accordance with standard procedures.

[1392] In vitro transcripts are suspended in water at a final concentration of 0.2 mg/ml. Ovarian lobes are removed from adult female toads, Stage V defolliculatedoocytes are obtained, and RNA transcripts (10 ng/oocyte) are injected in a 50 nl bolus using a microinjection apparatus. Two electrode voltage clamps are used to measure the currents from individual Xenopus oocytes in response to agonist exposure. Recordings are made in Ca2+ free Barth's medium at room temperature.

[1393] In a preferred embodiment, such a system can be used to screen known ligands and tissue/cell extracts for activating ligands. A number of GPCR ligands are known in the art and are encompassed by the present invention (see, for example, The G-Protein Linked Receptor Facts Book, referenced elsewhere herein).

### Example 11

### Method of Assessing the Physiological Function of the HGPRBMY30_{—}1, HGPRBMY30_{—}2, HGPRBMY30_{—}3, HGPRBMY41_{—}1, HGPRBMY41_{—}2, HGPRBMY41_{—}3, HGPRBMY42, HGPRBMY42_{—}1, HGPRBMY43, and/or HGPRBMY44 Polypeptides using Microphysiometric Assays

[1394] Activation of a wide variety of secondary messenger systems results in extrusion of small amounts of acid from a cell. The acid formed is largely as a result of the increased metabolic activity required to fuel the intracellular signaling process. The pH changes in the media surrounding the cell are very small but are detectable by the CYTOSENSOR microphysiometer (Molecular Devices Ltd., Menlo Park, Calif.). The CYTOSENSOR is thus capable of detecting the activation of a receptor that is coupled to an energy utilizing intracellular signaling pathway such as the G-protein coupled receptor of the present invention.

### Example 12

### Method of Assessing the Physiological Function of the HGPRBMY30_{—}1, HGPRBMY30_{—}2, HGPRBMY30_{—}3, HGPRBMY41_{—}1, HGPRBMY41_{—}2, HGPRBMY41_{—}3, HGPRBMY42, HGPRBMY42_{—}1, HGPRBMY43, and/or HGPRBMY44 Polypeptides using Calcium and Camp Functional Assays

[1395] A well known observation in the art relates to the fact that GPCR receptors which are expressed in HEK 293 cells have been shown to be functionally couple—leading to subsequent activation of phospoholipase C (PLC) and calcium mobilization, and/or cAMP stimuation or inhibition.

[1396] Based upon the above, calcium and cAMP assays may be useful in assessing the ability of HGPRBMY30_{—}1, HGPRBMY30_{—}2, HGPRBMY30_{—}3, HGPRBMY41_{—}1, HGPRBMY41_{—}2, HGPRBMY41_{—}3, HGPRBMY42, HGPRBMY42_{—}1, HGPRBMY43, and/or HGPRBMY44 to serve as a GPCR. Briefly, basal calcium levels in the HEK 293 cells in HGPRBMY30_{—}1, HGPRBMY30_{—}2, HGPRBMY30_{—}3, HGPRBMY41_{—}1, HGPRBMY41_{—}2, HGPRBMY41_{—}3, HGPRBMY42, HGPRBMY42_{—}1, HGPRBMY43, and/or HGPRBMY44-transfected or vector control cells can be observed to determine whether the levels fall within a normal physiological range, 100 nM to 200 nM. HEK 293 cells expressing recombinant receptors are then loaded with fura 2 and in a single day selected GPCR ligands or tissue/cell extracts are evaluated for agonist induced calcium mobilization. Similarly, HEK 293 cells expressing recombinant HGPRBMY30_{—}1, HGPRBMY30_{—}2, HGPRBMY30_{—}3, HGPRBMY41_{—}1, HGPRBMY41_{—}2, HGPRBMY41_{—}3, HGPRBMY42, HGPRBMY42_{—}1, HGPRBMY43, and/or HGPRBMY44 receptors are evaluated for the stimulation or inhibition of cAMP production using standard cAMP quantitation assays. Agonists presenting a calcium transient or cAMP flucuation are tested in vector control cells to determine if the response is unique to the transfected cells expressing the HGPRBMY30_{—}1, HGPRBMY30_{—}2, HGPRBMY30_{—}3, HGPRBMY41_{—}1, HGPRBMY41_{—}2, HGPRBMY41_{—}3, HGPRBMY42, HGPRBMY42_{—}1, HGPRBMY43, and/or HGPRBMY44 receptor.

### Example 13

### Method of Screening for Compounds that Interact with the HGPRBMY30_{—}1, HGPRBMY30_{—}2, HGPRBMY30_{—}3, HGPRBMY41_{—}1, HGPRBMY41_{—}2, HGPRBMY41_{—}3, HGPRBMY42, HGPRBMY42_{—}1, HGPRBMY43, and/or HGPRBMY44 Polypeptide

[1397] The following assays are designed to identify compounds that bind to the HGPRBMY30_{—}1, HGPRBMY30_{—}2, HGPRBMY30_{—}3, HGPRBMY41_{—}1, HGPRBMY41_{—}2, HGPRBMY41_{—}3, HGPRBMY42, HGPRBMY42_{—}1, HGPRBMY43, and/or HGPRBMY44 polypeptide, bind to other cellular proteins that interact with the HGPRBMY30_{—}1, HGPRBMY30_{—}2, HGPRBMY30_{—}3, HGPRBMY41_{—}1, HGPRBMY41_{—}2, HGPRBMY41_{—}3, HGPRBMY42, HGPRBMY42_{—}1, HGPRBMY43, and/or HGPRBMY44 polypeptide, and to compounds that interfere with the interaction of the HGPRBMY30_{—}1, HGPRBMY30_{—}2, HGPRBMY30_{—}3, HGPRBMY41_{—}1, HGPRBMY41_{—}2, HGPRBMY41_{—}3, HGPRBMY42, HGPRBMY42_{—}1, HGPRBMY43, and/or HGPRBMY44 polypeptide with other cellular proteins.

[1398] Such compounds can include, but are not limited to, other cellular proteins. Specifically, such compounds can include, but are not limited to, peptides, such as, for example, soluble peptides, including, but not limited to Ig-tailed fusion peptides, comprising extracellular portions of HGPRBMY30_{—}1, HGPRBMY30_{—}2, HGPRBMY30_{—}3, HGPRBMY41_{—}1, HGPRBMY41_{—}2, HGPRBMY41_{—}3, HGPRBMY42, HGPRBMY42_{—}1, HGPRBMY43, and/or HGPRBMY44 polypeptide transmembrane receptors, and members of random peptide libraries (see, e.g., Lam, K. S. et al., 1991, Nature 354:82-84; Houghton, R. et al., 1991, Nature 354:84-86), made of D- and/or L-configuration amino acids, phosphopeptides (including, but not limited to, members of random or partially degenerate phosphopeptide libraries; see, e.g., Songyang, Z., et al., 1993, Cell 72:767-778), antibodies (including, but not limited to, polyclonal, monoclonal, humanized, anti-idiotypic, chimeric or single chain antibodies, and FAb, F(ab′).sub.2 and FAb expression libary fragments, and epitope-binding fragments thereof), and small organic or inorganic molecules.

[1399] Compounds identified via assays such as those described herein can be useful, for example, in elaborating the biological function of the HGPRBMY30_{—}1, HGPRBMY30_{—}2, HGPRBMY30_{—}3, HGPRBMY41_{—}1, HGPRBMY41_{—}2, HGPRBMY41_{—}3, HGPRBMY42, HGPRBMY42_{—}1, HGPRBMY43, and/or HGPRBMY44 polypeptide, and for ameliorating symptoms of tumor progression, for example. In instances, for example, whereby a tumor progression state or disorder results from a lower overall level of HGPRBMY30_{—}1, HGPRBMY30_{—}2, HGPRBMY30_{—}3, HGPRBMY41_{—}1, HGPRBMY41_{—}2, HGPRBMY41_{—}3, HGPRBMY42, HGPRBMY42_{—}1, HGPRBMY43, and/or HGPRBMY44 expression, HGPRBMY30_{—}1, HGPRBMY30_{—}2, HGPRBMY30_{—}3, HGPRBMY41_{—}1, HGPRBMY41_{—}2, HGPRBMY41_{—}3, HGPRBMY42, HGPRBMY42_{—}1, HGPRBMY43, and/or HGPRBMY44 polypeptide, and/or HGPRBMY30_{—}1, HGPRBMY30_{—}2, HGPRBMY30_{—}3, HGPRBMY41_{—}1, HGPRBMY41_{—}2, HGPRBMY41_{—}3, HGPRBMY42, HGPRBMY42_{—}1, HGPRBMY43, and/or HGPRBMY44 polypeptide activity in a cell involved in the tumor progression state or disorder, compounds that interact with the HGPRBMY30_{—}1, HGPRBMY30_{—}2, HGPRBMY30_{—}3, HGPRBMY41_{—}1, HGPRBMY41_{—}2, HGPRBMY41_{—}3, HGPRBMY42, HGPRBMY42_{—}1, HGPRBMY43, and/or HGPRBMY44 polypeptide can include ones which accentuate or amplify the activity of the bound HGPRBMY30_{—}1, HGPRBMY30_{—}2, HGPRBMY30_{—}3, HGPRBMY41_{—}1, HGPRBMY41_{—}2, HGPRBMY41_{—}3, HGPRBMY42, HGPRBMY42_{—}1, HGPRBMY43, and/or HGPRBMY44 polypeptide. Such compounds would bring about an effective increase in the level of HGPRBMY30_{—}1, HGPRBMY30_{—}2, HGPRBMY30_{—}3, HGPRBMY41_{—}1, HGPRBMY41_{—}2, HGPRBMY41_{—}3, HGPRBMY42, HGPRBMY42_{—1}, HGPRBMY43, and/or HGPRBMY44 polypeptide activity, thus ameliorating symptoms of the tumor progression disorder or state. In instances whereby mutations within the HGPRBMY30_{—}1, HGPRBMY30_{—}2, HGPRBMY30_{—}3, HGPRBMY41_{—}1, HGPRBMY41_{—}2, HGPRBMY41_{—}3, HGPRBMY42, HGPRBMY42_{—1}, HGPRBMY43, and/or HGPRBMY44 polypeptide cause aberrant HGPRBMY30_{—}1, HGPRBMY30_{—}2, HGPRBMY30_{—}3, HGPRBMY41_{—}1, HGPRBMY41_{—}2, HGPRBMY41_{—}3, HGPRBMY42, HGPRBMY42_{—}1, HGPRBMY43, and/or HGPRBMY44 polypeptides to be made which have a deleterious effect that leads to tumor progression, compounds that bind HGPRBMY30_{—}1, HGPRBMY30_{—}2, HGPRBMY30_{—}3, HGPRBMY41_{—}1, HGPRBMY41_{—}2, HGPRBMY41_{—}3, HGPRBMY42, HGPRBMY42_{—}1, HGPRBMY43, and/or HGPRBMY44 polypeptide can be identified that inhibit the activity of the bound HGPRBMY30_{—}1, HGPRBMY30_{—}2, HGPRBMY30_{—}3, HGPRBMY41_{—}1, HGPRBMY41_{—}2, HGPRBMY41_{—}3, HGPRBMY42, HGPRBMY42_{—}1, HGPRBMY43, and/or HGPRBMY44 polypeptide. Assays for testing the effectiveness of such compounds are known in the art and discussed, elsewhere herein.

### Example 14

### Method of Screening, In Vitro, Compounds that Bind to the HGPRBMY30_{—}1, HGPRBMY30_{—}2, HGPRBMY30_{—}3, HGPRBMY41_{—}1, HGPRBMY41_{—}2, HGPRBMY41_{—}3, HGPRBMY42, HGPRBMY42_{—}1, HGPRBMY43, and/or HGPRBMY44 Polypeptide

[1400] In vitro systems can be designed to identify compounds capable of binding the HGPRBMY30_{—}1, HGPRBMY30_{—}2, HGPRBMY30_{—}3, HGPRBMY41_{—}1, HGPRBMY41_{—}2, HGPRBMY41_{—}3, HGPRBMY42, HGPRBMY42_{—}1, HGPRBMY43, and/or HGPRBMY44 polypeptide of the invention. Compounds identified can be useful, for example, in modulating the activity of wild type and/or mutant HGPRBMY30_{—}1, HGPRBMY30_{—}2, HGPRBMY30_{—}3, HGPRBMY41_{—}1, HGPRBMY41_{—}2, HGPRBMY41_{—}3, HGPRBMY42, HGPRBMY42_{—}1, HGPRBMY43, and/or HGPRBMY44 polypeptide, preferably mutant HGPRBMY30_{—}1, HGPRBMY30_{—}2, HGPRBMY30_{—}3, HGPRBMY41_{—}1, HGPRBMY41_{—}2, HGPRBMY41_{—}3, HGPRBMY42, HGPRBMY42_{—}1, HGPRBMY43, and/or HGPRBMY44 polypeptide, can be useful in elaborating the biological function of the HGPRBMY30_{—}1, HGPRBMY30_{—}2, HGPRBMY30_{—}3, HGPRBMY41_{—}1, HGPRBMY41_{—}2, HGPRBMY41_{—}3, HGPRBMY42, HGPRBMY42_{—}1, HGPRBMY43, and/or HGPRBMY44 polypeptide, can be utilized in screens for identifying compounds that disrupt normal HGPRBMY30_{—}1, HGPRBMY30_{—}2, HGPRBMY30_{—}3, HGPRBMY41_{—}1, HGPRBMY41_{—}2, HGPRBMY41_{—}3, HGPRBMY42, HGPRBMY42_{—}1, HGPRBMY43, and/or HGPRBMY44 polypeptide interactions, or can in themselves disrupt such interactions.

[1401] The principle of the assays used to identify compounds that bind to the HGPRBMY301, HGPRBMY30_{—}2, HGPRBMY30_{—}3, HGPRBMY41_{—}1, HGPRBMY41_{—}2, HGPRBMY41_{—}3, HGPRBMY42, HGPRBMY42_{—}1, HGPRBMY43, and/or HGPRBMY44 polypeptide involves preparing a reaction mixture of the HGPRBMY30_{—}1, HGPRBMY30_{—}2, HGPRBMY30_{—}3, HGPRBMY41_{—}1, HGPRBMY41_{—}2, HGPRBMY41_{—}3, HGPRBMY42, HGPRBMY42_{—}1, HGPRBMY43, and/or HGPRBMY44 polypeptide and the test compound under conditions and for a time sufficient to allow the two components to interact and bind, thus forming a complex which can be removed and/or detected in the reaction mixture. These assays can be conducted in a variety of ways. For example, one method to conduct such an assay would involve anchoring HGPRBMY30_{—}1, HGPRBMY30_{—}2, HGPRBMY30_{—}3, HGPRBMY41_{—}1, HGPRBMY41_{—}2, HGPRBMY41_{—}3, HGPRBMY42, HGPRBMY42_{—}1, HGPRBMY43, and/or HGPRBMY44 polypeptide or the test substance onto a solid phase and detecting HGPRBMY30_{—}1, HGPRBMY30_{—}2, HGPRBMY30_{—}3, HGPRBMY41_{—}1, HGPRBMY41_{—}2, HGPRBMY41_{—}3, HGPRBMY42, HGPRBMY42_{—}1, HGPRBMY43, and/or HGPRBMY44 polypeptide/test compound complexes anchored on the solid phase at the end of the reaction. In one embodiment of such a method, the HGPRBMY30_{—}1, HGPRBMY30 2, HGPRBMY30_{—}3, HGPRBMY41_{—}1, HGPRBMY41_{—}2, HGPRBMY41_{—}3, HGPRBMY42, HGPRBMY42_{—}1, HGPRBMY43, and/or HGPRBMY44 polypeptide can be anchored onto a solid surface, and the test compound, which is not anchored, can be labeled, either directly or indirectly.

[1402] In practice, microtitre plates can conveniently be utilized as the solid phase. The anchored component can be immobilized by non-covalent or covalent attachments. Non-covalent attachment can be accomplished by simply coating the solid surface with a solution of the protein and drying. Alternatively, an immobilized antibody, preferably a monoclonal antibody, specific for the protein to be immobilized can be used to anchor the protein to the solid surface. The surfaces can be prepared in advance and stored.

[1403] In order to conduct the assay, the nonimmobilized component is added to the coated surface containing the anchored component. After the reaction is complete, unreacted components are removed (e.g., by washing) under conditions such that any complexes formed will remain immobilized on the solid surface. The detection of complexes anchored on the solid surface can be accomplished in a number of ways. Where the previously immobilized component is pre-labeled, the detection of label immobilized on the surface indicates that complexes were formed. Where the previously nonimmobilized component is not pre-labeled, an indirect label can be used to detect complexes anchored on the surface; e.g., using a labeled antibody specific for the immobilized component (the antibody, in turn, can be directly labeled or indirectly labeled with a labeled anti-Ig antibody).

[1404] Alternatively, a reaction can be conducted in a liquid phase, the reaction products separated from unreacted components, and complexes detected; e.g., using an immobilized antibody specific for HGPRBMY30_{—}1, HGPRBMY30_{—}2, HGPRBMY30_{—}3, HGPRBMY41_{—}1, HGPRBMY41_{—}2, HGPRBMY41_{—}3, HGPRBMY42, HGPRBMY42_{—}1, HGPRBMY43, and/or HGPRBMY44 polypeptide or the test compound to anchor any complexes formed in solution, and a labeled antibody specific for the other component of the possible complex to detect anchored complexes.

[1405] Another example of a screening assay to identify compounds that bind to HGPRBMY30_{—}1, HGPRBMY30_{—}2, HGPRBMY30_{—}3, HGPRBMY41_{—}1, HGPRBMY41_{—}2, HGPRBMY41_{—}3, HGPRBMY42, HGPRBMY42_{—}1, HGPRBMY43, and/or HGPRBMY44, relates to the application of a cell membrane-based scintillation proximity assay (“SPA”). Such an assay would require the idenification of a ligand for HGPRBMY30_{—}1, HGPRBMY30_{—}2, HGPRBMY30_{—}3, HGPRBMY41_{—}1, HGPRBMY41_{—}2, HGPRBMY41_{—}3, HGPRBMY42, HGPRBMY42_{—}1, HGPRBMY43, and/or HGPRBMY44 polypeptide. Once identified, unlabeled ligand is added to assay-ready plates that would serve as a positive control. The SPA beads and membranes are added next, and then ¹²⁵I-labeled ligand is added. After an equilibration period of 2-4 hours at room temperature, the plates can be counted in a scintillation counting machine, and the percent inhibition or stimulation calculated. Such an SPA assay may be based upon a manual, automated, or semi-automated platform, and encompass 96, 384, 1536-well plates or more. Any number of SPA beads may be used as applicable to each assay. Examples of SPA beads include, for example, Leadseeker WGA PS (Amersham cat # RPNQ 0260), and SPA Beads (PVT-PEI-WGA-TypeA; Amersham cat # RPNQ0003). The utilized membranes may also be derived from a number of cell line and tissue sources depending upon the expression profile of the respective polypeptide and the adaptability of such a cell line or tissue source to the development of a SPA-based assay. Examples of membrane preparations include, for example, cell lines transformed to express the receptor to be assayed in CHO cells or HEK cells, for example. SPA-based assays are well known in the art and are encompassed by the present invention. One such assay is described in U.S. Pat. No. 4,568,649, which is incorporated herein by reference. The skilled artisan would acknowledge that certain modifications of known SPA assays may be required to adapt such assays to each respective polypeptide.

[1406] One such screening procedure involves the use of melanophores which are transfected to express the HGPRBMY30_{—}1, HGPRBMY30_{—}2, HGPRBMY30_{—}3, HGPRBMY41_{—}1, HGPRBMY41_{—}2, HGPRBMY41_{—}3, HGPRBMY42, HGPRBMY42_{—}1, HGPRBMY43, and/or HGPRBMY44 polypeptide of the present invention. Such a screening technique is described in PCT WO 92/01810, published Feb. 6, 1992. Such an assay may be employed to screen for a compound which inhibits activation of the receptor polypeptide of the present invention by contacting the melanophore cells which encode the receptor with both the receptor ligand, such as LPA, and a compound to be screened. Inhibition of the signal generated by the ligand indicates that a compound is a potential antagonist for the receptor, i. e., inhibits activation of the receptor.

[1407] The technique may also be employed for screening of compounds which activate the receptor by contacting such cells with compounds to be screened and determining whether such compound generates a signal, i. e., activates the receptor. Other screening techniques include the use of cells which express the HGPRBMY30_{—}1, HGPRBMY30_{—}2, HGPRBMY30_{—}3, HGPRBMY41_{—}1, HGPRBMY41_{—}2, HGPRBMY41_{—}3, HGPRBMY42, HGPRBMY42_{—}1, HGPRBMY43, and/or HGPRBMY44 polypeptide (for example, transfected CHO cells) in a system which measures extracellular pH changes caused by receptor activation. In this technique, compounds may be contacted with cells expressing the receptor polypeptide of the present invention. A second messenger response, e. g., signal transduction or pH changes, is then measured to determine whether the potential compound activates or inhibits the receptor.

[1408] Another screening technique involves expressing the HGPRBMY30_{—}1, HGPRBMY30_{—}2, HGPRBMY30_{—}3, HGPRBMY41_{—}1, HGPRBMY41_{—}2, HGPRBMY41_{—}3, HGPRBMY42, HGPRBMY42_{—}1, HGPRBMY43, and/or HGPRBMY44 polypeptide in which the receptor is linked to phospholipase C or D. Representative examples of such cells include, but are not limited to, endothelial cells, smooth muscle cells, and embryonic kidney cells. The screening may be accomplished as hereinabove described by detecting activation of the receptor or inhibition of activation of the receptor from the phospholipase second signal.

[1409] Another method involves screening for compounds which are antagonists or agonists by determining inhibition of binding of labeled ligand, such as LPA, to cells which have the receptor on the surface thereof, or cell membranes containing the receptor. Such a method involves transfecting a cell (such as eukaryotic cell) with DNA encoding the HGPRBMY30_{—}1, HGPRBMY30_{—}2, HGPRBMY30_{—}3, HGPRBMY41_{—}1, HGPRBMY41_{—}2, HGPRBMY41_{—}3, HGPRBMY42, HGPRBMY42_{—}1, HGPRBMY43, and/or HGPRBMY44 polypeptide such that the cell expresses the receptor on its surface. The cell is then contacted with a potential antagonist or agonist in the presence of a labeled form of a ligand, such as LPA. The ligand can be labeled, e. g., by radioactivity. The amount of labeled ligand bound to the receptors is measured, e. g., by measuring radioactivity associated with transfected cells or membrane from these cells. If the compound binds to the receptor, the binding of labeled ligand to the receptor is inhibited as determined by a reduction of labeled ligand which binds to the receptors. This method is called binding assay.

[1410] Another screening procedure involves the use of mammalian cells (CHO, HEK 293, Xenopus Oocytes, RBL-2H3, etc) which are transfected to express the receptor of interest. The cells are loaded with an indicator dye that produces a fluorescent signal when bound to calcium, and the cells are contacted with a test substance and a receptor agonist, such as LPA. Any change in fluorescent signal is measured over a defined period of time using, for example, a fluorescence spectrophotometer or a fluorescence imaging plate reader. A change in the fluorescence signal pattern generated by the ligand indicates that a compound is a potential antagonist or agonist for the receptor.

[1411] Another screening procedure involves use of mammalian cells (CHO, HEK293, Xenopus Oocytes, RBL-2H3, etc.) which are transfected to express the receptor of interest, and which are also transfected with a reporter gene construct that is coupled to activation of the receptor (for example, luciferase or beta-galactosidase behind an appropriate promoter). The cells are contacted with a test substance and the receptor agonist (ligand), such as LPA, and the signal produced by the reporter gene is measured after a defined period of time. The signal can be measured using a luminometer, spectrophotometer, fluorimeter, or other such instrument appropriate for the specific reporter construct used. Change of the signal generated by the ligand indicates that a compound is a potential antagonist or agonist for the receptor.

[1412] Another screening technique for antagonists or agonits involves introducing RNA encoding the HGPRBMY30_{—}1, HGPRBMY30_{—}2, HGPRBMY30_{—}3, HGPRBMY41_{—}1, HGPRBMY41_{—}2, HGPRBMY41_{—}3, HGPRBMY42, HGPRBMY42_{—}1, HGPRBMY43, and/or HGPRBMY44 polypeptide into Xenopus oocytes (or CHO, HEK 293, RBL-2H3, etc.) to transiently or stably express the receptor. The receptor oocytes are then contacted with the receptor ligand, such as LPA, and a compound to be screened. Inhibition or activation of the receptor is then determined by detection of a signal, such as, cAMP, calcium, proton, or other ions.

[1413] Another method involves screening for HGPRBMY30_{—}1, HGPRBMY30_{—}2, HGPRBMY30_{—}3, HGPRBMY41_{—}1, HGPRBMY41_{—}2, HGPRBMY41_{—}3, HGPRBMY42, HGPRBMY42_{—}1, HGPRBMY43, and/or HGPRBMY44 polypeptide inhibitors by determining inhibition or stimulation of HGPRBMY30_{—}1, HGPRBMY30_{—}2, HGPRBMY30_{—}3, HGPRBMY41_{—}1, HGPRBMY41_{—}2, HGPRBMY41_{—}3, HGPRBMY42, HGPRBMY42_{—}1, HGPRBMY43, and/or HGPRBMY44 polypeptide-mediated cAMP and/or adenylate cyclase accumulation or dimunition. Such a method involves transiently or stably transfecting a eukaryotic cell with HGPRBMY30_{—}1, HGPRBMY30_{—}2, HGPRBMY30_{—}3, HGPRBMY41_{—}1, HGPRBMY41_{—}2, HGPRBMY41_{—}3, HGPRBMY42, HGPRBMY42_{—}1, HGPRBMY43, and/or HGPRBMY44 polypeptide receptor to express the receptor on the cell surface.

[1414] The cell is then exposed to potential antagonists or agonists in the presence of HGPRBMY30_{—}1, HGPRBMY30_{—}2, HGPRBMY30_{—}3, HGPRBMY41_{—}1, HGPRBMY41_{—}2, HGPRBMY41_{—}3, HGPRBMY42, HGPRBMY42_{—}1, HGPRBMY43, and/or HGPRBMY44 polypeptide ligand, such as LPA. The changes in levels of cAMP is then measured over a defined period of time, for example, by radio-immuno or protein binding assays (for example using Flashplates or a scintillation proximity assay). Changes in cAMP levels can also be determined by directly measuring the activity of the enzyme, adenylyl cyclase, in broken cell preparations. If the potential antagonist or agonist binds the receptor, and thus inhibits HGPRBMY30_{—}1, HGPRBMY30_{—}2, HGPRBMY30_{—}3, HGPRBMY41_{—}1, HGPRBMY41_{—}2, HGPRBMY41_{—}3, HGPRBMY42, HGPRBMY42_{—}1, HGPRBMY43, and/or HGPRBMY44 polypeptide-ligand binding, the levels of HGPRBMY30_{—}1, HGPRBMY30_{—}2, HGPRBMY30_{—}3, HGPRBMY41_{—}1, HGPRBMY41_{—}2, HGPRBMY41_{—}3, HGPRBMY42, HGPRBMY42_{—}1, HGPRBMY43, and/or HGPRBMY44 polypeptide-mediated cAMP, or adenylate cyclase activity, will be reduced or increased.

[1415] One preferred screening method involves co-transfecting HEK-293 cells with a mammalian expression plasmid encoding a G-protein coupled receptor (GPCR), such as HGPRBMY30_{—}1, HGPRBMY30_{—}2, HGPRBMY30_{—}3, HGPRBMY41_{—}1, HGPRBMY41_{—}2, HGPRBMY41_{—}3, HGPRBMY42, HGPRBMY42_{—}1, HGPRBMY43, and/or HGPRBMY44, along with a mixture comprised of mammalian expression plasmids cDNAs encoding GU15 (Wilkie T. M. et al Proc Natl Acad Sci USA 1991 88: 10049-10053), GU16 (Amatruda T. T. et al Proc Natl Acad Sci USA 1991 8: 5587-5591, and three chimeric G-proteins refered to as Gqi5, Gqs5, and Gqo5 (Conklin B R et al Nature 1993 363: 274-276, Conklin B. R. et al Mol Pharmacol 1996 50: 885-890). Following a 24 h incubation the trasfected HEK-293 cells are plated into poly-D-lysine coated 96 well black/clear plates (Becton Dickinson, Bedford, Mass.).

[1416] The cells are assayed on FLIPR (Fluorescent Imaging Plate Reader, Molecular Devices, Sunnyvale, Calif.) for a calcium mobilization response following addition of test ligands. Upon identification of a ligand which stimulates calcium mobilization in HEK-293 cells expressing a given GPCR and the G-protein mixtures, subsequent experiments are performed to determine which, if any, G-protein is required for the functional response. HEK-293 cells are then transfected with the test GPCR, or co-transfected with the test GPCR and G015, GD16, GqiS, Gqs5, or Gqo5. If the GPCR requires the presence of one of the G-proteins for functional expression in HEK-293 cells, all subsequent experiments are performed with HEK-293 cell cotransfected with the GPCR and the G-protein which gives the best response. Alternatively, the receptor can be expressed in a different cell line, for example RBL-2H3, without additional Gproteins.

[1417] Another screening method for agonists and antagonists relies on the endogenous pheromone response pathway in the yeast, Saccharomyces cerevisiae. Heterothallic strains of yeast can exist in two mitotically stable haploid mating types, MATa and MATa. Each cell type secretes a small peptide hormone that binds to a G-protein coupled receptor on opposite mating type cells which triggers a MAP kinase cascade leading to G1 arrest as a prelude to cell fusion.

[1418] Genetic alteration of certain genes in the pheromone response pathway can alter the normal response to pheromone, and heterologous expression and coupling of human G-protein coupled receptors and humanized G-protein subunits in yeast cells devoid of endogenous pheromone receptors can be linked to downstream signaling pathways and reporter genes (e. g., U.S. Pat. Nos. 5,063,154; 5,482,835; 5,691,188). Such genetic alterations include, but are not limited to, (i) deletion of the STE2 or STE3 gene encoding the endogenous G-protein coupled pheromone receptors; (ii) deletion of the FAR1 gene encoding a protein that normally associates with cyclindependent kinases leading to cell cycle arrest; and (iii) construction of reporter genes fused to the FUS 1 gene promoter (where FUS 1 encodes a membrane-anchored glycoprotein required for cell fusion). Downstream reporter genes can permit either a positive growth selection (e. g., histidine prototrophy using the FUS1-HIS3 reporter), or a colorimetric, fluorimetric or spectrophotometric readout, depending on the specific reporter construct used (e. g., b-galactosidase induction using a FUS1-LacZ reporter).

[1419] The yeast cells can be further engineered to express and secrete small peptides from random peptide libraries, some of which can permit autocrine activation of heterologously expressed human (or mammalian) G-protein coupled receptors (Broach, J. R. and Thorner, J., Nature 384: 14-16, 1996; Manfredi et al., Mol. Cell. Biol. 16: 4700-4709,1996). This provides a rapid direct growth selection (e. g, using the FUS 1-HIS3 reporter) for surrogate peptide agonists that activate characterized or orphan receptors. Alternatively, yeast cells that functionally express human (or mammalian) G-protein coupled receptors linked to a reporter gene readout (e. g., FUS1-LacZ) can be used as a platform for high-throughput screening of known ligands, fractions of biological extracts and libraries of chemical compounds for either natural or surrogate ligands.

[1420] Functional agonists of sufficient potency (whether natural or surrogate) can be used as screening tools in yeast cell-based assays for identifying G-protein coupled receptor antagonists. For example, agonists will promote growth of a cell with FUS-HIS3 reporter or give positive readout for a cell with FUSI-LacZ. However, a candidate compound which inhibits growth or negates the positive readout induced by an agonist is an antagonist. For this purpose, the yeast system offers advantages over mammalian expression systems due to its ease of utility and null receptor background (lack of endogenous G-protein coupled receptors) which often interferes with the ability to identify agonists or antagonists.

### Example 15

### Method for Identifying a Putative Ligand for the HGPRBMY30_{—}1, HGPRBMY30_{—}2, HGPRBMY30_{—}3, HGPRBMY41_{—}1, HGPRBMY41_{—}2, HGPRBMY41_{—}3, HGPRBMY42, HGPRBMY42_{—}1, HGPRBMY43, and/or HGPRBMY44 Polypeptides

[1421] Ligand binding assays provide a direct method for ascertaining receptor pharmacology and are adaptable to a high throughput format. A panel of known GPCR purified ligands may be radiolabeled to high specific activity (50-2000 Ci/mmol) for binding studies. A determination is then made that the process of radiolabeling does not diminish the activity of the ligand towards its receptor. Assay conditions for buffers, ions, pH and other modulators such as nucleotides are optimized to establish a workable signal to noise ratio for both membrane and whole cell receptor sources. For these assays, specific receptor binding is defined as total associated radioactivity minus the radioactivity measured in the presence of an excess of unlabeled competing ligand. Where possible, more than one competing ligand is used to define residual nonspecific binding.

[1422] A number of GPCR ligands are known in the art and are encompassed by the present invention (see, for example, The G-Protein Linked Receptor Facts Book, referenced elsewhere herein).

[1423] Alternatively, the HGPRBMY30_{—}1, HGPRBMY30_{—}2, HGPRBMY30_{—}3, HGPRBMY41_{—}1, HGPRBMY41_{—}2, HGPRBMY41_{—}3, HGPRBMY42, HGPRBMY42_{—}1, HGPRBMY43, and/or HGPRBMY44 polypeptide of the present invention may also be functionally screened (using calcium, cAMP, microphysiometer, oocyte electrophysiology, etc., functional screens) against tissue extracts to identify natural ligands. Extracts that produce positive functional responses can be sequencially subfractionated until an activating ligand is isolated identified using methods well known in the art, some of which are described herein.

### Example 16

### Method of Identifying Compounds that Interfere with HGPRBMY30_{—}1, HGPRBMY30_{—}2, HGPRBMY30_{—}3, HGPRBMY41_{—}1, HGPRBMY41_{—}2, HGPRBMY41_{—}3, HGPRBMY42, HGPRBMY42_{—}1, HGPRBMY43, and/or HGPRBMY44 Polypeptide/Cellular Product Interaction

[1424] The HGPRBMY30_{—}1, HGPRBMY30_{—}2, HGPRBMY30_{—}3, HGPRBMY41_{—}1, HGPRBMY41_{—}2, HGPRBMY41_{—}3, HGPRBMY42, HGPRBMY42_{—}1, HGPRBMY43, and/or HGPRBMY44 polypeptide of the invention can, in vivo, interact with one or more cellular or extracellular macromolecules, such as proteins. Such macromolecules include, but are not limited to, polypeptides, particularly GPCR ligands, and those products identified via screening methods described, elsewhere herein. For the purposes of this discussion, such cellular and extracellular macromolecules are referred to herein as “binding partner(s)”. For the purpose of the present invention, “binding partner” may also encompass polypeptides, small molecule compounds, polysaccarides, lipids, and any other molecule or molecule type referenced herein. Compounds that disrupt such interactions can be useful in regulating the activity of the HGPRBMY30_{—}1, HGPRBMY30_{—}2, HGPRBMY30_{—}3, HGPRBMY41_{—}1, HGPRBMY41_{—}2, HGPRBMY41_{—}3, HGPRBMY42, HGPRBMY42_{—}1, HGPRBMY43, and/or HGPRBMY44 polypeptide, especially mutant HGPRBMY30_{—}1, HGPRBMY30_{—}2, HGPRBMY30_{—}3, HGPRBMY41_{—}1, HGPRBMY41_{—}2, HGPRBMY41_{—}3, HGPRBMY42, HGPRBMY42_{—}1, HGPRBMY43, and/or HGPRBMY44 polypeptide. Such compounds can include, but are not limited to molecules such as antibodies, peptides, and the like described in elsewhere herein.

[1425] The basic principle of the assay systems used to identify compounds that interfere with the interaction between the HGPRBMY30_{—}1, HGPRBMY30_{—}2, HGPRBMY30_{—}3, HGPRBMY41_{—}1, HGPRBMY41_{—}2, HGPRBMY41_{—}3, HGPRBMY42, HGPRBMY42_{—}1, HGPRBMY43, and/or HGPRBMY44 polypeptide and its cellular or extracellular binding partner or partners involves preparing a reaction mixture containing the HGPRBMY30_{—}1, HGPRBMY30_{—}2, HGPRBMY30_{—}3, HGPRBMY41_{—}1, HGPRBMY41_{—}2, HGPRBMY41_{—}3, HGPRBMY42, HGPRBMY42_{—}1, HGPRBMY43, and/or HGPRBMY44 polypeptide, and the binding partner under conditions and for a time sufficient to allow the two products to interact and bind, thus forming a complex. In order to test a compound for inhibitory activity, the reaction mixture is prepared in the presence and absence of the test compound. The test compound can be initially included in the reaction mixture, or can be added at a time subsequent to the addition of HGPRBMY30_{—}1, HGPRBMY30_{—}2, HGPRBMY30_{—}3, HGPRBMY41_{—}1, HGPRBMY41_{—}2, HGPRBMY41_{—}3, HGPRBMY42, HGPRBMY42_{—}1, HGPRBMY43, and/or HGPRBMY44 polypeptide and its cellular or extracellular binding partner. Control reaction mixtures are incubated without the test compound or with a placebo. The formation of any complexes between the HGPRBMY30_{—}1, HGPRBMY30_{—}2, HGPRBMY30_{—}3, HGPRBMY41_{—}1, HGPRBMY41_{—}2, HGPRBMY41_{—}3, HGPRBMY42, HGPRBMY42_{—}1, HGPRBMY43, and/or HGPRBMY44 polypeptide and the cellular or extracellular binding partner is then detected. The formation of a complex in the control reaction, but not in the reaction mixture containing the test compound, indicates that the compound interferes with the interaction of the HGPRBMY30_{—}1, HGPRBMY30_{—}2, HGPRBMY30_{—}3, HGPRBMY41_{—}1, HGPRBMY41_{—}2, HGPRBMY41_{—}3, HGPRBMY42, HGPRBMY42_{—}1, HGPRBMY43, and/or HGPRBMY44 polypeptide and the interactive binding partner. Additionally, complex formation within reaction mixtures containing the test compound and normal HGPRBMY30_{—}1, HGPRBMY30_{—}2, HGPRBMY30_{—}3, HGPRBMY41_{—}1, HGPRBMY41_{—}2, HGPRBMY41_{—}3, HGPRBMY42, HGPRBMY42_{—}1, HGPRBMY43, and/or HGPRBMY44 polypeptide can also be compared to complex formation within reaction mixtures containing the test compound and mutant HGPRBMY30_{—}1, HGPRBMY30_{—}2, HGPRBMY30_{—}3, HGPRBMY41_{—}1, HGPRBMY41_{—}2, HGPRBMY41_{—}3, HGPRBMY42, HGPRBMY42_{—}1, HGPRBMY43, and/or HGPRBMY44 polypeptide. This comparison can be important in those cases wherein it is desirable to identify compounds that disrupt interactions of mutant but not normal HGPRBMY30_{—}1, HGPRBMY30_{—}2, HGPRBMY30_{—}3, HGPRBMY41_{—}1, HGPRBMY41_{—}2, HGPRBMY41_{—}3, HGPRBMY42, HGPRBMY42_{—}1, HGPRBMY43, and/or HGPRBMY44 polypeptide.

[1426] The assay for compounds that interfere with the interaction of the HGPRBMY30_{—}1, HGPRBMY30_{—}2, HGPRBMY30_{—}3, HGPRBMY41_{—}1, HGPRBMY41_{—}2, HGPRBMY41_{—}3, HGPRBMY42, HGPRBMY42_{—}1, HGPRBMY43, and/or HGPRBMY44 polypeptide and binding partners can be conducted in a heterogeneous or homogeneous format. Heterogeneous assays involve anchoring either the HGPRBMY30_{—}1, HGPRBMY30_{—}2, HGPRBMY30_{—}3, HGPRBMY41_{—}1, HGPRBMY41_{—}2, HGPRBMY41_{—}3, HGPRBMY42, HGPRBMY42_{—}1, HGPRBMY43, and/or HGPRBMY44 polypeptide or the binding partner onto a solid phase and detecting complexes anchored on the solid phase at the end of the reaction. In homogeneous assays, the entire reaction is carried out in a liquid phase. In either approach, the order of addition of reactants can be varied to obtain different information about the compounds being tested. For example, test compounds that interfere with the interaction between the HGPRBMY30_{—}1, HGPRBMY30_{—}2, HGPRBMY30_{—}3, HGPRBMY41_{—}1, HGPRBMY41_{—}2, HGPRBMY41_{—}3, HGPRBMY42, HGPRBMY42_{—}1, HGPRBMY43, and/or HGPRBMY44 polypeptide and the binding partners, e.g., by competition, can be identified by conducting the reaction in the presence of the test substance; i.e., by adding the test substance to the reaction mixture prior to or simultaneously with the HGPRBMY30_{—}1, HGPRBMY30_{—}2. HGPRBMY30_{—}3, HGPRBMY41_{—}1, HGPRBMY41_{—}2, HGPRBMY41_{—}3, HGPRBMY42, HGPRBMY42_{—}1, HGPRBMY43, and/or HGPRBMY44 polypeptide and interactive cellular or extracellular binding partner. Alternatively, test compounds that disrupt preformed complexes, e.g. compounds with higher binding constants that displace one of the components from the complex, can be tested by adding the test compound to the reaction mixture after complexes have been formed. The various formats are described briefly below.

[1427] In a heterogeneous assay system, either the HGPRBMY30_{—}1, HGPRBMY30_{—}2, HGPRBMY30_{—}3, HGPRBMY41_{—}1, HGPRBMY41_{—}2, HGPRBMY41_{—}3, HGPRBMY42, HGPRBMY42_{—}1, HGPRBMY43, and/or HGPRBMY44 polypeptide or the interactive cellular or extracellular binding partner, is anchored onto a solid surface, while the non-anchored species is labeled, either directly or indirectly. In practice, microtitre plates are conveniently utilized. The anchored species can be immobilized by non-covalent or covalent attachments. Non-covalent attachment can be accomplished simply by coating the solid surface with a solution of the HGPRBMY30_{—}1, HGPRBMY30_{—}2, HGPRBMY30_{—}3, HGPRBMY41_{—}1, HGPRBMY41_{—}2, HGPRBMY41_{—}3, HGPRBMY42, HGPRBMY42_{—}1, HGPRBMY43, and/or HGPRBMY44 polypeptide or binding partner and drying. Alternatively, an immobilized antibody specific for the species to be anchored can be used to anchor the species to the solid surface. The surfaces can be prepared in advance and stored.

[1428] In order to conduct the assay, the partner of the immobilized species is exposed to the coated surface with or without the test compound. After the reaction is complete, unreacted components are removed (e.g., by washing) and any complexes formed will remain immobilized on the solid surface. The detection of complexes anchored on the solid surface can be accomplished in a number of ways. Where the non-immobilized species is pre-labeled, the detection of label immobilized on the surface indicates that complexes were formed. Where the non-immobilized species is not pre-labeled, an indirect label can be used to detect complexes anchored on the surface; e.g., using a labeled antibody specific for the initially non-immobilized species (the antibody, in turn, can be directly labeled or indirectly labeled with a labeled anti-Ig antibody). Depending upon the order of addition of reaction components, test compounds which inhibit complex formation or which disrupt preformed complexes can be detected.

[1429] Alternatively, the reaction can be conducted in a liquid phase in the presence or absence of the test compound, the reaction products separated from unreacted components, and complexes detected; e.g., using an immobilized antibody specific for one of the binding components to anchor any complexes formed in solution, and a labeled antibody specific for the other partner to detect anchored complexes. Again, depending upon the order of addition of reactants to the liquid phase, test compounds which inhibit complex or which disrupt preformed complexes can be identified.

[1430] In an alternate embodiment of the invention, a homogeneous assay can be used. In this approach, a preformed complex of the HGPRBMY30_{—}1, HGPRBMY30_{—}2, HGPRBMY30_{—}3, HGPRBMY41_{—}1, HGPRBMY41_{—}2, HGPRBMY41_{—}3, HGPRBMY42, HGPRBMY42_{—}1, HGPRBMY43, and/or HGPRBMY44 polypeptide and the interactive cellular or extracellular binding partner product is prepared in which either the HGPRBMY30_{—}1, HGPRBMY30_{—}2, HGPRBMY30_{—}3, HGPRBMY41_{—}1, HGPRBMY41_{—}2, HGPRBMY41_{—}3, HGPRBMY42, HGPRBMY42_{—}1, HGPRBMY43, and/or HGPRBMY44 polypeptide or their binding partners are labeled, but the signal generated by the label is quenched due to complex formation (see, e.g., U.S. Pat. No. 4,109,496 by Rubenstein which utilizes this approach for immunoassays). The addition of a test substance that competes with and displaces one of the species from the preformed complex will result in the generation of a signal above background. In this way, test substances which disrupt HGPRBMY30_{—}1, HGPRBMY30_{—}2, HGPRBMY30_{—}3, HGPRBMY41_{—}1, HGPRBMY41_{—}2, HGPRBMY41_{—}3, HGPRBMY42, HGPRBMY42_{—}1, HGPRBMY43, and/or HGPRBMY44 polypeptide-cellular or extracellular binding partner interaction can be identified.

[1431] In a particular embodiment, the HGPRBMY30_{—}1, HGPRBMY30_{—}2, HGPRBMY30_{—}3, HGPRBMY41_{—}1, HGPRBMY41_{—}2, HGPRBMY41_{—}3, HGPRBMY42, HGPRBMY42_{—}1, HGPRBMY43, and/or HGPRBMY44 polypeptide can be prepared for immobilization using recombinant DNA techniques known in the art. For example, the HGPRBMY30_{—}1, HGPRBMY30_{—}2, HGPRBMY30_{—}3, HGPRBMY41_{—}1, HGPRBMY41_{—}2, HGPRBMY41_{—}3, HGPRBMY42, HGPRBMY42_{—}1, HGPRBMY43, and/or HGPRBMY44 polypeptide coding region can be fused to a glutathione-S-transferase (GST) gene using a fusion vector such as pGEX-5X-1, in such a manner that its binding activity is maintained in the resulting fusion product. The interactive cellular or extracellular product can be purified and used to raise a monoclonal antibody, using methods routinely practiced in the art and described above. This antibody can be labeled with the radioactive isotope sup. 125I, for example, by methods routinely practiced in the art. In a heterogeneous assay, e.g., the GST-HGPRBMY30_{—}1, HGPRBMY30_{—}2, HGPRBMY30_{—}3, HGPRBMY41_{—}1, HGPRBMY41_{—}2, HGPRBMY41_{—}3, HGPRBMY42, HGPRBMY42_{—}1, HGPRBMY43, and/or HGPRBMY44 polypeptide fusion product can be anchored to glutathione-agarose beads. The interactive cellular or extracellular binding partner product can then be added in the presence or absence of the test compound in a manner that allows interaction and binding to occur. At the end of the reaction period, unbound material can be washed away, and the labeled monoclonal antibody can be added to the system and allowed to bind to the complexed components. The interaction between the HGPRBMY30_{—}1, HGPRBMY30_{—}2, HGPRBMY30_{—}3, HGPRBMY41_{—}1, HGPRBMY41_{—}2, HGPRBMY41_{—}3, HGPRBMY42, HGPRBMY42_{—}1, HGPRBMY43, and/or HGPRBMY44 polypeptide and the interactive cellular or extracellular binding partner can be detected by measuring the amount of radioactivity that remains associated with the glutathione-agarose beads. A successful inhibition of the interaction by the test compound will result in a decrease in measured radioactivity.

[1432] Alternatively, the GST-HGPRBMY30_{—}1, HGPRBMY30_{—}2, HGPRBMY30_{—}3, HGPRBMY41_{—}1, HGPRBMY41_{—}2, HGPRBMY41_{—}3, HGPRBMY42, HGPRBMY42_{—}1, HGPRBMY43, and/or HGPRBMY44 polypeptide fusion product and the interactive cellular or extracellular binding partner product can be mixed together in liquid in the absence of the solid glutathione-agarose beads. The test compound can be added either during or after the binding partners are allowed to interact. This mixture can then be added to the glutathione-agarose beads and unbound material is washed away. Again the extent of inhibition of the binding partner interaction can be detected by adding the labeled antibody and measuring the radioactivity associated with the beads.

[1433] In another embodiment of the invention, these same techniques can be employed using peptide fragments that correspond to the binding domains of the HGPRBMY30_{—}1, HGPRBMY30_{—}2, HGPRBMY30_{—}3, HGPRBMY41_{—}1, HGPRBMY41_{—}2, HGPRBMY41_{—}3, HGPRBMY42, HGPRBMY42_{—}1, HGPRBMY43, and/or HGPRBMY44 polypeptide product and the interactive cellular or extracellular binding partner (in case where the binding partner is a product), in place of one or both of the full length products.

[1434] Any number of methods routinely practiced in the art can be used to identify and isolate the protein's binding site. These methods include, but are not limited to, mutagenesis of one of the genes encoding one of the products and screening for disruption of binding in a co-immunoprecipitation assay. Compensating mutations in the gene encoding the second species in the complex can be selected. Sequence analysis of the genes encoding the respective products will reveal the mutations that correspond to the region of the product involved in interactive binding. Alternatively, one product can be anchored to a solid surface using methods described in this Section above, and allowed to interact with and bind to its labeled binding partner, which has been treated with a proteolytic enzyme, such as trypsin. After washing, a short, labeled peptide comprising the binding domain can remain associated with the solid material, which can be isolated and identified by amino acid sequencing. Also, once the gene coding for the cellular or extracellular binding partner product is obtained, short gene segments can be engineered to express peptide fragments of the product, which can then be tested for binding activity and purified or synthesized.

### Example 17

### Isolation of a Specific Clone from the Deposited Sample

[1435] The deposited material in the sample assigned the ATCC Deposit Number cited in Table I for any given cDNA clone also may contain one or more additional plasmids, each comprising a cDNA clone different from that given clone. Thus, deposits sharing the same ATCC Deposit Number contain at least a plasmid for each cDNA clone identified in Table I. Typically, each ATCC deposit sample cited in Table I comprises a mixture of approximately equal amounts (by weight) of about 1-10 plasmid DNAs, each containing a different cDNA clone and/or partial cDNA clone; but such a deposit sample may include plasmids for more or less than 2 cDNA clones.

[1436] Two approaches can be used to isolate a particular clone from the deposited sample of plasmid DNA(s) cited for that clone in Table I. First, a plasmid is directly isolated by screening the clones using a polynucleotide probe corresponding to SEQ ID NO:1, SEQ ID NO:3, SEQ ID NO:5, SEQ ID NO:7, SEQ ID NO:9, SEQ ID NO:11, SEQ ID NO:13, SEQ ID NO:15, SEQ ID NO:17, and/or SEQ ID NO:19.

[1437] Particularly, a specific polynucleotide with 30-40 nucleotides is synthesized using an Applied Biosystems DNA synthesizer according to the sequence reported. The oligonucleotide is labeled, for instance, with 32P-(-ATP using T4 polynucleotide kinase and purified according to routine methods. (E.g., Maniatis et al., Molecular Cloning: A Laboratory Manual, Cold Spring Harbor Press, Cold Spring, N.Y. (1982).) The plasmid mixture is transformed into a suitable host, as indicated above (such as XL-1 Blue (Stratagene)) using techniques known to those of skill in the art, such as those provided by the vector supplier or in related publications or patents cited above. The transformants are plated on 1.5% agar plates (containing the appropriate selection agent, e.g., ampicillin) to a density of about 150 transformants (colonies) per plate. These plates are screened using Nylon membranes according to routine methods for bacterial colony screening (e.g., Sambrook et al., Molecular Cloning: A Laboratory Manual, 2nd Edit., (1989), Cold Spring Harbor Laboratory Press, pages 1.93 to 1.104), or other techniques known to those of skill in the art.

[1438] Alternatively, two primers of 17-20 nucleotides derived from both ends of the SEQ ID NO:1, SEQ ID NO:3, SEQ ID NO:5, SEQ ID NO:7, SEQ ID NO:9, SEQ ID NO:11, SEQ ID NO:13, SEQ ID NO:15, SEQ ID NO:17, and/or SEQ ID NO:19 (i.e., within the region of SEQ ID NO:1, SEQ ID NO:3, SEQ ID NO:5, SEQ ID NO:7, SEQ ID NO:9, SEQ ID NO:11, SEQ ID NO:13, SEQ ID NO:15, SEQ ID NO:17, and/or SEQ ID NO:19 bounded by the 5′ NT and the 3′ NT of the clone defined in Table I) are synthesized and used to amplify the desired cDNA using the deposited cDNA plasmid as a template. The polymerase chain reaction is carried out under routine conditions, for instance, in 25 ul of reaction mixture with 0.5 ug of the above cDNA template. A convenient reaction mixture is 1.5-5 mM MgCl2, 0.01% (w/v) gelatin, 20 uM each of dATP, dCTP, dGTP, dTTP, 25 pmol of each primer and 0.25 Unit of Taq polymerase. Thirty five cycles of PCR (denaturation at 94 degree C. for 1 min; annealing at 55 degree C. for 1 min; elongation at 72 degree C. for 1 min) are performed with a Perkin-Elmer Cetus automated thermal cycler. The amplified product is analyzed by agarose gel electrophoresis and the DNA band with expected molecular weight is excised and purified. The PCR product is verified to be the selected sequence by subcloning and sequencing the DNA product.

[1439] The polynucleotide(s) of the present invention, the polynucleotide encoding the polypeptide of the present invention, or the polypeptide encoded by the deposited clone may represent partial, or incomplete versions of the complete coding region (i.e., full-length gene). Several methods are known in the art for the identification of the 5′ or 3′ non-coding and/or coding portions of a gene which may not be present in the deposited clone. The methods that follow are exemplary and should not be construed as limiting the scope of the invention. These methods include but are not limited to, filter probing, clone enrichment using specific probes, and protocols similar or identical to 5′ and 3′ “RACE” protocols that are well known in the art. For instance, a method similar to 5′ RACE is available for generating the missing 5′ end of a desired full-length transcript. (Fromont-Racine et al., Nucleic Acids Res. 21(7):1683-1684 (1993)).

[1440] Briefly, a specific RNA oligonucleotide is ligated to the 5′ ends of a population of RNA presumably containing full-length gene RNA transcripts. A primer set containing a primer specific to the ligated RNA oligonucleotide and a primer specific to a known sequence of the gene of interest is used to PCR amplify the 5′ portion of the desired full-length gene. This amplified product may then be sequenced and used to generate the full-length gene.

[1441] This above method starts with total RNA isolated from the desired source, although poly-A+ RNA can be used. The RNA preparation can then be treated with phosphatase if necessary to eliminate 5′ phosphate groups on degraded or damaged RNA that may interfere with the later RNA ligase step. The phosphatase should then be inactivated and the RNA treated with tobacco acid pyrophosphatase in order to remove the cap structure present at the 5′ ends of messenger RNAs. This reaction leaves a 5′ phosphate group at the 5′ end of the cap cleaved RNA which can then be ligated to an RNA oligonucleotide using T4 RNA ligase.

[1442] This modified RNA preparation is used as a template for first strand cDNA synthesis using a gene specific oligonucleotide. The first strand synthesis reaction is used as a template for PCR amplification of the desired 5′ end using a primer specific to the ligated RNA oligonucleotide and a primer specific to the known sequence of the gene of interest. The resultant product is then sequenced and analyzed to confirm that the 5′ end sequence belongs to the desired gene. Moreover, it may be advantageous to optimize the RACE protocol to increase the probability of isolating additional 5′ or 3′ coding or non-coding sequences. Various methods of optimizing a RACE protocol are known in the art, though a detailed description summarizing these methods can be found in B. C. Schaefer, Anal. Biochem., 227:255-273, (1995).

[1443] An alternative method for carrying out 5′ or 3′ RACE for the identification of coding or non-coding sequences is provided by Frohman, M. A., et al., Proc. Nat'l. Acad. Sci. USA, 85:8998-9002 (1988). Briefly, a cDNA clone missing either the 5′ or 3′ end can be reconstructed to include the absent base pairs extending to the translational start or stop codon, respectively. In some cases, cDNAs are missing the start of translation, therefor. The following briefly describes a modification of this original 5′ RACE procedure. Poly A+ or total RNAs reverse transcribed with Superscript II (Gibco/BRL) and an antisense or1 complementary primer specific to the cDNA sequence. The primer is removed from the reaction with a Microcon Concentrator (Amicon). The first-strand cDNA is then tailed with dATP and terminal deoxynucleotide transferase (Gibco/BRL). Thus, an anchor sequence is produced which is needed for PCR amplification. The second strand is synthesized from the dA-tail in PCR buffer, Taq DNA polymerase (Perkin-Elmer Cetus), an oligo-dT primer containing three adjacent restriction sites (XhoIJ Sail and ClaI) at the 5′ end and a primer containing just these restriction sites. This double-stranded cDNA is PCR amplified for 40 cycles with the same primers as well as a nested cDNA-specific antisense primer. The PCR products are size-separated on an ethidium bromide-agarose gel and the region of gel containing cDNA products the predicted size of missing protein-coding DNA is removed. cDNA is purified from the agarose with the Magic PCR Prep kit (Promega), restriction digested with XhoI or SalI, and ligated to a plasmid such as pBluescript SKII (Stratagene) at XhoI and EcoRV sites. This DNA is transformed into bacteria and the plasmid clones sequenced to identify the correct protein-coding inserts. Correct 5′ ends are confirmed by comparing this sequence with the putatively identified homologue and overlap with the partial cDNA clone. Similar methods known in the art and/or commercial kits are used to amplify and recover 3′ ends.

[1444] Several quality-controlled kits are commercially available for purchase. Similar reagents and methods to those above are supplied in kit form from Gibco/BRL for both 5′ and 3′ RACE for recovery of full length genes. A second kit is available from Clontech which is a modification of a related technique, SLIC (single-stranded ligation to single-stranded cDNA), developed by Dumas et al., Nucleic Acids Res., 19:5227-32(1991). The major differences in procedure are that the RNA is alkaline hydrolyzed after reverse transcription and RNA ligase is used to join a restriction site-containing anchor primer to the first-strand cDNA. This obviates the necessity for the dA-tailing reaction which results in a polyT stretch that is difficult to sequence past.

[1445] An alternative to generating 5′ or 3′ cDNA from RNA is to use cDNA library double-stranded DNA. An asymmetric PCR-amplified antisense cDNA strand is synthesized with an antisense cDNA-specific primer and a plasmid-anchored primer. These primers are removed and a symmetric PCR reaction is performed with a nested cDNA-specific antisense primer and the plasmid-anchored primer.

[1446] RNA Ligase Protocol for Generating the 5′ or 3′ End Sequences to Obtain Full Length Genes

[1447] Once a gene of interest is identified, several methods are available for the identification of the 5′ or 3′ portions of the gene which may not be present in the original cDNA plasmid. These methods include, but are not limited to, filter probing, clone enrichment using specific probes and protocols similar and identical to 5′ and 3′RACE. While the full-length gene may be present in the library and can be identified by probing, a useful method for generating the 5′ or 3′ end is to use the existing sequence information from the original cDNA to generate the missing information. A method similar to 5′RACE is available for generating the missing 5′ end of a desired full-length gene. (This method was published by Fromont-Racine et al., Nucleic Acids Res., 21(7): 1683-1684 (1993)). Briefly, a specific RNA oligonucleotide is ligated to the 5′ ends of a population of RNA presumably 30 containing full-length gene RNA transcript and a primer set containing a primer specific to the ligated RNA oligonucleotide and a primer specific to a known sequence of the gene of interest, is used to PCR amplify the 5′ portion of the desired full length gene which may then be sequenced and used to generate the full length gene. This method starts with total RNA isolated from the desired source, poly A RNA may be used but is not a prerequisite for this procedure. The RNA preparation may then be treated with phosphatase if necessary to eliminate 5′ phosphate groups on degraded or damaged RNA which may interfere with the later RNA ligase step. The phosphatase if used is then inactivated and the RNA is treated with tobacco acid pyrophosphatase in order to remove the cap structure present at the 5′ ends of messenger RNAs. This reaction leaves a 5′ phosphate group at the 5′ end of the cap cleaved RNA which can then be ligated to an RNA oligonucleotide using T4 RNA ligase. This modified RNA preparation can then be used as a template for first strand cDNA synthesis using a gene specific oligonucleotide. The first strand synthesis reaction can then be used as a template for PCR amplification of the desired 5′ end using a primer specific to the ligated RNA oligonucleotide and a primer specific to the known sequence of the apoptosis related of interest. The resultant product is then sequenced and analyzed to confirm that the 5′ end sequence belongs to the relevant apoptosis related.

### Example 18

### Tissue Distribution of Polypeptide

[1448] Tissue distribution of mRNA expression of polynucleotides of the present invention is determined using protocols for Northern blot analysis, described by, among others, Sambrook et al. For example, a cDNA probe produced by the method described in Example 17 is labeled with p32 using the rediprime(tm) DNA labeling system (Amersham Life Science), according to manufacturer's instructions. After labeling, the probe is purified using CHROMA SPIN0-100 column (Clontech Laboratories, Inc.) according to manufacturer's protocol number PT1200-1. The purified labeled probe is then used to examine various tissues for mRNA expression.

[1449] Tissue Northern blots containing the bound mRNA of various tissues are examined with the labeled probe using ExpressHybtm hybridization solution (Clonetech according to manufacturers protocol number PT1190-1. Northern blots can be produced using various protocols well known in the art (e.g., Sambrook et al). Following hybridization and washing, the blots are mounted and exposed to film at −70C. overnight, and the films developed according to standard procedures.

### Example 19

### Chromosomal Mapping of the Polynucleotides

[1450] An oligonucleotide primer set is designed according to the sequence at the 5′ end of SEQ ID NO:1, SEQ ID NO:3, SEQ ID NO:5, SEQ ID NO:7, SEQ ID NO:9, SEQ ID NO:11, SEQ ID NO:13, SEQ ID NO:15, SEQ ID NO:17, and/or SEQ ID NO:19. This primer preferably spans about 100 nucleotides. This primer set is then used in a polymerase chain reaction under the following set of conditions: 30 seconds, 95 degree C.; 1 minute, 56 degree C.; 1 minute, 70 degree C. This cycle is repeated 32 times followed by one 5 minute cycle at 70 degree C. Mammalian DNA, preferably human DNA, is used as template in addition to a somatic cell hybrid panel containing individual chromosomes or chromosome fragments (Bios, Inc). The reactions are analyzed on either 8% polyacrylamide gels or 3.5% agarose gels. Chromosome mapping is determined by the presence of an approximately 100 bp PCR fragment in the particular somatic cell hybrid.

### Example 20

### Bacterial Expression of a Polypeptide

[1451] A polynucleotide encoding a polypeptide of the present invention is amplified using PCR oligonucleotide primers corresponding to the 5′ and 3′ ends of the DNA sequence, as outlined in Example 17, to synthesize insertion fragments. The primers used to amplify the cDNA insert should preferably contain restriction sites, such as BamHI and XbaI, at the 5′ end of the primers in order to clone the amplified product into the expression vector. For example, BamHI and XbaI correspond to the restriction enzyme sites on the bacterial expression vector pQE-9. (Qiagen, Inc., Chatsworth, Calif.). This plasmid vector encodes antibiotic resistance (Ampr), a bacterial origin of replication (ori), an IPTG-regulatable promoter/operator (P/O), a ribosome binding site (RBS), a 6-histidine tag (6-His), and restriction enzyme cloning sites.

[1452] The pQE-9 vector is digested with BamHI and XbaI and the amplified fragment is ligated into the pQE-9 vector maintaining the reading frame initiated at the bacterial RBS. The ligation mixture is then used to transform the E. coli strain M15/rep4 (Qiagen, Inc.) which contains multiple copies of the plasmid pREP4, that expresses the lacI repressor and also confers kanamycin resistance (Kanr). Transformants are identified by their ability to grow on LB plates and ampicillin/kanamycin resistant colonies are selected. Plasmid DNA is isolated and confirmed by restriction analysis.

[1453] Clones containing the desired constructs are grown overnight (O/N) in liquid culture in LB media supplemented with both Amp (100 ug/ml) and Kan (25 ug/ml). The O/N culture is used to inoculate a large culture at a ratio of 1:100 to 1:250. The cells are grown to an optical density 600 (O.D.600) of between 0.4 and 0.6. IPTG (Isopropyl-B-D-thiogalacto pyranoside) is then added to a final concentration of 1 mM. IPTG induces by inactivating the lacI repressor, clearing the P/O leading to increased gene expression.

[1454] Cells are grown for an extra 3 to 4 hours. Cells are then harvested by centrifugation (20 mins at 6000×g). The cell pellet is solubilized in the chaotropic agent 6 Molar Guanidine HCl by stirring for 3-4 hours at 4 degree C. The cell debris is removed by centrifugation, and the supernatant containing the polypeptide is loaded onto a nickel-nitrilo-tri-acetic acid (“Ni-NTA”) affinity resin column (available from QIAGEN, Inc., supra). Proteins with a 6×His tag bind to the Ni-NTA resin with high affinity and can be purified in a simple one-step procedure (for details see: The QIAexpressionist (1995) QIAGEN, Inc., supra).

[1455] Briefly, the supernatant is loaded onto the column in 6 M guanidine-HCl, pH 8, the column is first washed with 10 volumes of 6 M guanidine-HCl, pH 8, then washed with 10 volumes of 6 M guanidine-HCl pH 6, and finally the polypeptide is eluted with 6 M guanidine-HCl, pH 5.

[1456] The purified protein is then renatured by dialyzing it against phosphate-buffered saline (PBS) or 50 mM Na-acetate, pH 6 buffer plus 200 mM NaCl. Alternatively, the protein can be successfully refolded while immobilized on the Ni-NTA column. The recommended conditions are as follows: renature using a linear 6M-1M urea gradient in 500 mM NaCl, 20% glycerol, 20 mM Tris/HCl pH 7.4, containing protease inhibitors. The renaturation should be performed over a period of 1.5 hours or more. After renaturation the proteins are eluted by the addition of 250 mM imidazole. Imidazole is removed by a final dialyzing step against PBS or 50 mM sodium acetate pH 6 buffer plus 200 mM NaCl. The purified protein is stored at 4 degree C. or frozen at −80 degree C.

### Example 21

### Purification of a Polypeptide from an Inclusion Body

[1457] The following alternative method can be used to purify a polypeptide expressed in E coli when it is present in the form of inclusion bodies. Unless otherwise specified, all of the following steps are conducted at 4-10 degree C.

[1458] Upon completion of the production phase of the E. coli fermentation, the cell culture is cooled to 4-10 degree C. and the cells harvested by continuous centrifugation at 15,000 rpm (Heraeus Sepatech). On the basis of the expected yield of protein per unit weight of cell paste and the amount of purified protein required, an appropriate amount of cell paste, by weight, is suspended in a buffer solution containing 100 mM Tris, 50 mM EDTA, pH 7.4. The cells are dispersed to a homogeneous suspension using a high shear mixer.

[1459] The cells are then lysed by passing the solution through a microfluidizer (Microfluidics, Corp. or APV Gaulin, Inc.) twice at 4000-6000 psi. The homogenate is then mixed with NaCl solution to a final concentration of 0.5 M NaCl, followed by centrifugation at 7000× g for 15 min. The resultant pellet is washed again using 0.5M NaCl, 100 mM Tris, 50 mM EDTA, pH 7.4.

[1460] The resulting washed inclusion bodies are solubilized with 1.5 M guanidine hydrochloride (GuHCl) for 2-4 hours. After 7000×g centrifugation for 15 min., the pellet is discarded and the polypeptide containing supernatant is incubated at 4 degree C. overnight to allow further GuHCl extraction.

[1461] Following high speed centrifugation (30,000×g) to remove insoluble particles, the GuHCl solubilized protein is refolded by quickly mixing the GuHCl extract with 20 volumes of buffer containing 50 mM sodium, pH 4.5, 150 mM NaCl, 2 mM EDTA by vigorous stirring. The refolded diluted protein solution is kept at 4 degree C. without mixing for 12 hours prior to further purification steps.

[1462] To clarify the refolded polypeptide solution, a previously prepared tangential filtration unit equipped with 0.16 um membrane filter with appropriate surface area (e.g., Filtron), equilibrated with 40 mM sodium acetate, pH 6.0 is employed. The filtered sample is loaded onto a cation exchange resin (e.g., Poros HS-50, Perceptive Biosystems). The column is washed with 40 mM sodium acetate, pH 6.0 and eluted with 250 mM, 500 mM, 1000 mM, and 1500 mM NaCl in the same buffer, in a stepwise manner. The absorbance at 280 nm of the effluent is continuously monitored. Fractions are collected and further analyzed by SDS-PAGE.

[1463] Fractions containing the polypeptide are then pooled and mixed with 4 volumes of water. The diluted sample is then loaded onto a previously prepared set of tandem columns of strong anion (Poros HQ-50, Perceptive Biosystems) and weak anion (Poros CM-20, Perceptive Biosystems) exchange resins. The columns are equilibrated with 40 mM sodium acetate, pH 6.0. Both columns are washed with 40 mM sodium acetate, pH 6.0, 200 mM NaCl. The CM-20 column is then eluted using a 10 column volume linear gradient ranging from 0.2 M NaCl, 50 mM sodium acetate, pH 6.0 to 1.0 M NaCl, 50 mM sodium acetate, pH 6.5. Fractions are collected under constant A280 monitoring of the effluent. Fractions containing the polypeptide (determined, for instance, by 16% SDS-PAGE) are then pooled.

[1464] The resultant polypeptide should exhibit greater than 95% purity after the above refolding and purification steps. No major contaminant bands should be observed from Coomassie blue stained 16% SDS-PAGE gel when 5 ug of purified protein is loaded. The purified protein can also be tested for endotoxin/LPS contamination, and typically the LPS content is less than 0.1 ng/ml according to LAL assays.

### Example 22

### Cloning and Expression of a Polypeptide in a Baculovirus Expression System

[1465] In this example, the plasmid shuttle vector pAc373 is used to insert a polynucleotide into a baculovirus to express a polypeptide. A typical baculovirus expression vector contains the strong polyhedrin promoter of the Autographa californica nuclear polyhedrosis virus (AcMNPV) followed by convenient restriction sites, which may include, for example BamHI, Xba I and Asp718. The polyadenylation site of the simian virus 40 (“SV40”) is often used for efficient polyadenylation. For easy selection of recombinant virus, the plasmid contains the beta-galactosidase gene from E. coli under control of a weak Drosophila promoter in the same orientation, followed by the polyadenylation signal of the polyhedrin gene. The inserted genes are flanked on both sides by viral sequences for cell-mediated homologous recombination with wild-type viral DNA to generate a viable virus that express the cloned polynucleotide.

[1466] Many other baculovirus vectors can be used in place of the vector above, such as pVL941 and pAcIM1, as one skilled in the art would readily appreciate, as long as the construct provides appropriately located signals for transcription, translation, secretion and the like, including a signal peptide and an in-frame AUG as required. Such vectors are described, for instance, in Luckow et al., Virology 170:31-39 (1989).

[1467] A polynucleotide encoding a polypeptide of the present invention is amplified using PCR oligonucleotide primers corresponding to the 5′ and 3′ ends of the DNA sequence, as outlined in Example 17, to synthesize insertion fragments. The primers used to amplify the cDNA insert should preferably contain restriction sites at the 5′ end of the primers in order to clone the amplified product into the expression vector. Specifically, the cDNA sequence contained in the deposited clone, including the AUG initiation codon and the naturally associated leader sequence identified elsewhere herein (if applicable), is amplified using the PCR protocol described in Example 17. If the naturally occurring signal sequence is used to produce the protein, the vector used does not need a second signal peptide. Alternatively, the vector can be modified to include a baculovirus leader sequence, using the standard methods described in Summers et al., “A Manual of Methods for Baculovirus Vectors and Insect Cell Culture Procedures” Texas Agricultural Experimental Station Bulletin No. 1555 (1987).

[1468] The amplified fragment is isolated from a 1% agarose gel using a commercially available kit (“Geneclean” BIO 101 Inc., La Jolla, Calif.). The fragment then is digested with appropriate restriction enzymes and again purified on a 1% agarose gel.

[1469] The plasmid is digested with the corresponding restriction enzymes and optionally, can be dephosphorylated using calf intestinal phosphatase, using routine procedures known in the art. The DNA is then isolated from a 1% agarose gel using a commercially available kit (“Geneclean” BIO 101 Inc., La Jolla, Calif.).

[1470] The fragment and the dephosphorylated plasmid are ligated together with T4 DNA ligase. E. coli HB101 or other suitable E. coli hosts such as XL-1 Blue (Stratagene Cloning Systems, La Jolla, Calif.) cells are transformed with the ligation mixture and spread on culture plates. Bacteria containing the plasmid are identified by digesting DNA from individual colonies and analyzing the digestion product by gel electrophoresis. The sequence of the cloned fragment is confirmed by DNA sequencing.

[1471] Five ug of a plasmid containing the polynucleotide is co-transformed with 1.0 ug of a commercially available linearized baculovirus DNA (“BaculoGoldtm baculovirus DNA”, Pharmingen, San Diego, Calif.), using the lipofection method described by Felgner et al., Proc. Natl. Acad. Sci. USA 84:7413-7417 (1987). One ug of BaculoGoldtm virus DNA and 5 ug of the plasmid are mixed in a sterile well of a microtiter plate containing 50 ul of serum-free Grace's medium (Life Technologies Inc., Gaithersburg, MD). Afterwards, 10 ul Lipofectin plus 90 ul Grace's medium are added, mixed and incubated for 15 minutes at room temperature. Then the transfection mixture is added drop-wise to Sf9 insect cells (ATCC CRL 1711) seeded in a 35 mm tissue culture plate with 1 ml Grace's medium without serum. The plate is then incubated for 5 hours at 27 degrees C. The transfection solution is then removed from the plate and 1, ml of Grace's insect medium supplemented with 10% fetal calf serum is added. Cultivation is then continued at 27 degrees C. for four days.

[1472] After four days the supernatant is collected and a plaque assay is performed, as described by Summers and Smith, supra. An agarose gel with “Blue Gal” (Life Technologies Inc., Gaithersburg) is used to allow easy identification and isolation of gal-expressing clones, which produce blue-stained plaques. (A detailed description of a “plaque assay” of this type can also be found in the user's guide for insect cell culture and baculovirology distributed by Life Technologies Inc., Gaithersburg, page 9-10.) After appropriate incubation, blue stained plaques are picked with the tip of a micropipettor (e.g., Eppendorf). The agar containing the recombinant viruses is then resuspended in a microcentrifuge tube containing 200 ul of Grace's medium and the suspension containing the recombinant baculovirus is used to infect Sf9 cells seeded in 35 mm dishes. Four days later the supernatants of these culture dishes are harvested and then they are stored at 4 degree C.

[1473] To verify the expression of the polypeptide, Sf9 cells are grown in Grace's medium supplemented with 10% heat-inactivated FBS. The cells are infected with the recombinant baculovirus containing the polynucleotide at a multiplicity of infection (“MOI”) of about 2. If radiolabeled proteins are desired, 6 hours later the medium is removed and is replaced with SF900 II medium minus methionine and cysteine (available from Life Technologies Inc., Rockville, Md.). After 42 hours, 5 uCi of 35S-methionine and 5 uCi 35S-cysteine (available from Amersham) are added. The cells are further incubated for 16 hours and then are harvested by centrifugation. The proteins in the supernatant as well as the intracellular proteins are analyzed by SDS-PAGE followed by autoradiography (if radiolabeled).

[1474] Microsequencing of the amino acid sequence of the amino terminus of purified protein may be used to determine the amino terminal sequence of the produced protein.

### Example 23

### Expression of a Polypeptide in Mammalian Cells

[1475] The polypeptide of the present invention can be expressed in a mammalian cell. A typical mammalian expression vector contains a promoter element, which mediates the initiation of transcription of mRNA, a protein coding sequence, and signals required for the termination of transcription and polyadenylation of the transcript. Additional elements include enhancers, Kozak sequences and intervening sequences flanked by donor and acceptor sites for RNA splicing. Highly efficient transcription is achieved with the early and late promoters from SV40, the long terminal repeats (LTRs) from Retroviruses, e.g., RSV, HTLV1, HIVI and the early promoter of the cytomegalovirus (CMV). However, cellular elements can also be used (e.g., the human actin promoter).

[1476] Suitable expression vectors for use in practicing the present invention include, for example, vectors such as pSVL and pMSG (Pharmacia, Uppsala, Sweden), pRSVcat (ATCC 37152), pSV2dhfr (ATCC 37146), pBC12MI (ATCC 67109), pCMVSport 2.0, and pCMVSport 3.0. Mammalian host cells that could be used include, human Hela, 293, H9 and Jurkat cells, mouse NIH3T3 and C127 cells, Cos 1, Cos 7 and CV1, quail QC1-3 cells, mouse L cells and Chinese hamster ovary (CHO) cells.

[1477] Alternatively, the polypeptide can be expressed in stable cell lines containing the polynucleotide integrated into a chromosome. The co-transformation with a selectable marker such as dhfr, gpt, neomycin, hygromycin allows the identification and isolation of the transformed cells.

[1478] The transformed gene can also be amplified to express large amounts of the encoded protein. The DHFR (dihydrofolate reductase) marker is useful in developing cell lines that carry several hundred or even several thousand copies of the gene of interest. (See, e.g., Alt, F. W., et al., J. Biol. Chem. 253:1357-1370 (1978); Hamlin, J. L. and Ma, C., Biochem. et Biophys. Acta, 1097:107-143 (1990); Page, M. J. and Sydenham, M. A., Biotechnology 9:64-68 (1991).) Another useful selection marker is the enzyme glutamine synthase (GS) (Murphy et al., Biochem J. 227:277-279 (1991); Bebbington et al., Bio/Technology 10:169-175 (1992). Using these markers, the mammalian cells are grown in selective medium and the cells with the highest resistance are selected. These cell lines contain the amplified gene(s) integrated into a chromosome. Chinese hamster ovary (CHO) and NSO cells are often used for the production of proteins.

[1479] A polynucleotide of the present invention is amplified according to the protocol outlined in herein. If the naturally occurring signal sequence is used to produce the protein, the vector does not need a second signal peptide. Alternatively, if the naturally occurring signal sequence is not used, the vector can be modified to include a heterologous signal sequence. (See, e.g., WO 96/34891.) The amplified fragment is isolated from a 1% agarose gel using a commercially available kit (“Geneclean” BIO 101 Inc., La Jolla, Calif.). The fragment then is digested with appropriate restriction enzymes and again purified on a 1% agarose gel.

[1480] The amplified fragment is then digested with the same restriction enzyme and purified on a 1% agarose gel. The isolated fragment and the dephosphorylated vector are then ligated with T4 DNA ligase. E. coli HB101 or XL-1 Blue cells are then transformed and bacteria are identified that contain the fragment inserted into plasmid pC6 using, for instance, restriction enzyme analysis.

[1481] Chinese hamster ovary cells lacking an active DHFR gene is used for transformation. Five μg of an expression plasmid is cotransformed with 0.5 ug of the plasmid pSVneo using lipofectin (Felgner et al., supra). The plasmid pSV2-neo contains a dominant selectable marker, the neo gene from Tn5 encoding an enzyme that confers resistance to a group of antibiotics including G418. The cells are seeded in alpha minus MEM supplemented with 1 mg/ml G418. After 2 days, the cells are trypsinized and seeded in hybridoma cloning plates (Greiner, Germany) in alpha minus MEM supplemented with 10, 25, or 50 ng/ml of methotrexate plus1 mg/ml G418. After about 10-14 days single clones are trypsinized and then seeded in 6-well petri dishes or 10 ml flasks using different concentrations of methotrexate (50 nM, 100 nM, 200 nM, 400 nM, 800 nM). Clones growing at the highest concentrations of methotrexate are then transferred to new 6-well plates containing even higher concentrations of methotrexate (1 uM, 2 uM, 5 uM, 10 mM, 20 mM). The same procedure is repeated until clones are obtained which grow at a concentration of 100-200 uM. Expression of the desired gene product is analyzed, for instance, by SDS-PAGE and Western blot or by reversed phase HPLC analysis.

### Example 24

### Method of Creating N- and C-Terminal Deletion Mutants Corresponding to the HGPRBMY30_{—}1, HGPRBMY30_{—}2, HGPRBMY30_{—}3, HGPRBMY41_{—}1, HGPRBMY41_{—}2. HGPRBMY41_{—}3, HGPRBMY42, HGPRBMY42_{—}1, HGPRBMY43, and/or HGPRBMY44 Polypeptide of the Present Invention

[1482] As described elsewhere herein, the present invention encompasses the creation of N- and C-terminal deletion mutants, in addition to any combination of N- and C-terminal deletions thereof, corresponding to the HGPRBMY30_{—}1, HGPRBMY30_{—}2, HGPRBMY30_{—}3, HGPRBMY41_{—}1, HGPRBMY41_{—}2, HGPRBMY41_{—}3, HGPRBMY42, HGPRBMY42_{—}1, HGPRBMY43, and/or HGPRBMY44 polypeptide of the present invention. A number of methods are available to one skilled in the art for creating such mutants. Such methods may include a combination of PCR amplification and gene cloning methodology. Although one of skill in the art of molecular biology, through the use of the teachings provided or referenced herein, and/or otherwise known in the art as standard methods, could readily create each deletion mutant of the present invention, exemplary methods are described below.

[1483] Briefly, using the isolated cDNA clone encoding the full-length HGPRBMY30_{—}1, HGPRBMY30_{—}2, HGPRBMY30_{—}3, HGPRBMY41_{—}1, HGPRBMY41_{—}2, HGPRBMY41_{—}3, HGPRBMY42, HGPRBMY42_{—}1, HGPRBMY43, and/or HGPRBMY44 polypeptide sequence (as described in Example 17, for example), appropriate primers of about 15-25 nucleotides derived from the desired 5′ and 3′ positions of SEQ ID NO:1, SEQ ID NO:3, SEQ ID NO:5, SEQ ID NO:7, SEQ ID NO:9, SEQ ID NO:11, SEQ ID NO:13, SEQ ID NO:15, SEQ ID NO:17, and/or SEQ ID NO:19 may be designed to PCR amplify, and subsequently clone, the intended N- and/or C-terminal deletion mutant. Such primers could comprise, for example, an inititation and stop codon for the 5′ and 3′ primer, respectively. Such primers may also comprise restriction sites to facilitate cloning of the deletion mutant post amplification. Moreover, the primers may comprise additional sequences, such as, for example, flag-tag sequences, kozac sequences, or other sequences discussed and/or referenced herein.

[1484] Representative PCR amplification conditions are provided below, although the skilled artisan would appreciate that other conditions may be required for efficient amplification. A 100 ul PCR reaction mixture may be prepared using lOng of the template DNA (cDNA clone of HGPRBMY30_{—}1, HGPRBMY30_{—}2, HGPRBMY30_{—}3, HGPRBMY41_{—}1, HGPRBMY41_{—}2, HGPRBMY41_{—}3, HGPRBMY42, HGPRBMY42_{—}1, HGPRBMY43, and/or HGPRBMY44), 200 uM 4 dNTPs, 1 uM primers, 0.25U Taq DNA polymerase (PE), and standard Taq DNA polymerase buffer. Typical PCR cycling condition are as follows:

[1485] 20-25 cycles:45 sec, 93 degrees

[1486] 2 min, 50 degrees

[1487] 2 min, 72 degrees

[1488] 1 cycle:10 min, 72 degrees

[1489] After the final extension step of PCR, 5U Klenow Fragment may be added and incubated for 15 min at 30 degrees.

[1490] Upon digestion of the fragment with the NotI and SalI restriction enzymes, the fragment could be cloned into an appropriate expression and/or cloning vector which has been similarly digested (e.g., pSport1, among others). The skilled artisan would appreciate that other plasmids could be equally substituted, and may be desirable in certain circumstances. The digested fragment and vector are then ligated using a DNA ligase, and then used to transform competent E.coli cells using methods provided herein and/or otherwise known in the art.

[1491] The 5′ primer sequence for amplifying any additional N-terminal deletion mutants may be determined by reference to the following formula:

[1492] (S+(X*3)) to ((S+(X*3))+25), wherein ‘S’ is equal to the nucleotide position of the initiating start codon of the HGPRBMY30_{—}1, HGPRBMY30_{—}2, HGPRBMY30_{—}3, HGPRBMY41_{—}1, HGPRBMY41_{—}2, HGPRBMY41_{—}3, HGPRBMY42, HGPRBMY42_{—}1, HGPRBMY43, and/or HGPRBMY44 gene (SEQ ID NO:1, SEQ ID NO:3, SEQ ID NO:5, SEQ ID NO:7, SEQ ID NO:9, SEQ ID NO:11, SEQ ID NO:13, SEQ ID NO:15, SEQ ID NO:17, and/or SEQ ID NO:19), and ‘X’ is equal to the most N-terminal amino acid of the intended N-terminal deletion mutant. The first term will provide the start 5′ nucleotide position of the 5′ primer, while the second term will provide the end 3′ nucleotide position of the 5′ primer corresponding to sense strand of SEQ ID NO:1, SEQ ID NO:3, SEQ ID NO:5, SEQ ID NO:7, SEQ ID NO:9, SEQ ID NO:11, SEQ ID NO:13, SEQ ID NO:15, SEQ ID NO:17, and/or SEQ ID NO:19. Once the corresponding nucleotide positions of the primer are determined, the final nucleotide sequence may be created by the addition of applicable restriction site sequences to the 5′ end of the sequence, for example. As referenced herein, the addition of other sequences to the 5′ primer may be desired in certain circumstances (e.g., kozac sequences, etc.).

[1493] The 3′ primer sequence for amplifying any additional N-terminal deletion mutants may be determined by reference to the following formula:

[1494] (S+(X*3)) to ((S+(X*3))−25), wherein ‘S’ is equal to the nucleotide position of the initiating start codon of the HGPRBMY30_{—}1, HGPRBMY30_{—}2, HGPRBMY30_{—}3, HGPRBMY41_{—}1, HGPRBMY41_{—}2, HGPRBMY41_{—}3, HGPRBMY42, HGPRBMY42_{—}1, HGPRBMY43, and/or HGPRBMY44 gene (SEQ ID NO:1, SEQ ID NO:3, SEQ ID NO:5, SEQ ID NO:7, SEQ ID NO:9, SEQ ID NO:11, SEQ ID NO:13, SEQ ID NO:15, SEQ ID NO:17, and/or SEQ ID NO:19), and ‘X’ is equal to the most C-terminal amino acid of the intended N-terminal deletion mutant. The first term will provide the start 5′ nucleotide position of the 3′ primer, while the second term will provide the end 3′ nucleotide position of the 3′ primer corresponding to the anti-sense strand of SEQ ID NO:1, SEQ ID NO:3, SEQ ID NO:5, SEQ ID NO:7, SEQ ID NO:9, SEQ ID NO:11, SEQ ID NO:13, SEQ ID NO:15, SEQ ID NO:17, and/or SEQ ID NO:19. Once the corresponding nucleotide positions of the primer are determined, the final nucleotide sequence may be created by the addition of applicable restriction site sequences to the 5′ end of the sequence, for example. As referenced herein, the addition of other sequences to the 3′ primer may be desired in certain circumstances (e.g., stop codon sequences, etc.). The skilled artisan would appreciate that modifications of the above nucleotide positions may be necessary for optimizing PCR amplification.

[1495] The same general formulas provided above may be used in identifying the 5′ and 3′ primer sequences for amplifying any C-terminal deletion mutant of the present invention. Moreover, the same general formulas provided above may be used in identifying the 5′ and 3′ primer sequences for amplifying any combination of N-terminal and C-terminal deletion mutant of the present invention. The skilled artisan would appreciate that modifications of the above nucleotide positions may be necessary for optimizing PCR amplification.

### Example 25

### Protein Fusions

[1496] The polypeptides of the present invention are preferably fused to other proteins. These fusion proteins can be used for a variety of applications. For example, fusion of the present polypeptides to His-tag, HA-tag, protein A, IgG domains, and maltose binding protein facilitates purification. (See Example described herein; see also EP A 394,827; Traunecker, et al., Nature 331:84-86 (1988).) Similarly, fusion to IgG-1, IgG-3, and albumin increases the half-life time in vivo. Nuclear localization signals fused to the polypeptides of the present invention can target the protein to a specific subcellular localization, while covalent heterodimer or homodimers can increase or decrease the activity of a fusion protein. Fusion proteins can also create chimeric molecules having more than one function. Finally, fusion proteins can increase solubility and/or stability of the fused protein compared to the non-fused protein. All of the types of fusion proteins described above can be made by modifying the following protocol, which outlines the fusion of a polypeptide to an IgG molecule.

[1497] Briefly, the human Fe portion of the IgG molecule can be PCR amplified, using primers that span the 5′ and 3′ ends of the sequence described below. These primers also should have convenient restriction enzyme sites that will facilitate cloning into an expression vector, preferably a mammalian expression vector. Note that the polynucleotide is cloned without a stop codon, otherwise a fusion protein will not be produced.

[1498] The naturally occurring signal sequence may be used to produce the protein (if applicable). Alternatively, if the naturally occurring signal sequence is not used, the vector can be modified to include a heterologous signal sequence. (See, e.g., WO 96/34891 and/or U.S. Pat. No. 6,066,781, supra.) Human IgG Fe region:

(SEQ ID NO:465)

GGGATCCGGAGCCCAAATCTTCTGACAAAACTCACACATGCCCACCGTGC
CCAGCACCTGAATTCGAGGGTGCACCGTCAGTCTTCCTCTTCCCCCCAAA
ACCCAAGGACACCCTCATGATCTCCCGGACTCCTGAGGTCACATGCGTGG
TGGTGGACGTAAGCCACGAAGACCCTGAGGTCAAGTTCAACTGGTACGTG
GACGGCGTGGAGGTGCATAATGCCAAGACAAAGCCGCGGGAGGAGCAGTA
CAACAGCACGTACCGTGTGGTCAGCGTCCTCACCGTCCTGCACCAGGACT
GGCTGAATGGCAAGGAGTACAAGTGCAAGGTCTCCAACAAAGCCCTCCCA
ACCCCCATCGAGAAAACCATCTCCAAAGCCAAAGGGCAGCCCCGAGAACC
ACAGGTGTACACCCTGCCCCCATCCCGGGATGAGCTGACCAAGAACCAGG
TCAGCCTGACCTGCCTGGTCAAAGGCTTCTATCCAAGCGACATCGCCGTG
GAGTGGGAGAGCAATGGGCAGCCGGAGAACAACTACAAGACCACGCCTCC
CGTGCTGGACTCCGACGGCTCCTTCTTCCTCTACAGCAAGCTCACCGTGG
ACAAGAGCAGGTGGCAGCAGGGGAACGTCTTCTCATGCTCCGTGATGCAT
GAGGCTCTGCACAACCACTACACGCAGAAGAGCCTCTCCCTGTCTCCGGG
TAAATGAGTGCGACGGCCGCGACTCTAGAGGAT

### Example 26

### Regulation of Protein Expression Via Controlled Aggregation in the Endoplasmic Reticulum

[1499] As described more particularly herein, proteins regulate diverse cellular processes in higher organisms, ranging from rapid metabolic changes to growth and differentiation. Increased production of specific proteins could be used to prevent certain diseases and/or disease states. Thus, the ability to modulate the expression of specific proteins in an organism would provide significant benefits.

[1500] Numerous methods have been developed to date for introducing foreign genes, either under the control of an inducible, constitutively active, or endogenous promoter, into organisms. Of particular interest are the inducible promoters (see, M. Gossen, et al., Proc. Natl. Acad. Sci. USA., 89:5547 (1992); Y. Wang, et al., Proc. Natl. Acad. Sci. USA, 91:8180 (1994), D. No., et al., Proc. Natl. Acad. Sci. USA, 93:3346 (1996); and V. M. Rivera, et al., Nature Med, 2:1028 (1996); in addition to additional examples disclosed elsewhere herein). In one example, the gene for erthropoietin (Epo) was transferred into mice and primates under the control of a small molecule inducer for expression (e.g., tetracycline or rapamycin) (see, D. Bohl, et al., Blood, 92:1512, (1998); K. G. Rendahl, et al., Nat. Biotech, 16:757, (1998); V. M. Rivera, et al., Proc. Natl. Acad. Sci. USA, 96:8657 (1999); and X. Ye et al., Science, 283:88 (1999). Although such systems enable efficient induction of the gene of interest in the organism upon addition of the inducing agent (i.e., tetracycline, rapamycin, etc,.), the levels of expression tend to peak at 24 hours and trail off to background levels after 4 to 14 days. Thus, controlled transient expression is virtually impossible using these systems, though such control would be desirable.

[1501] A new alternative method of controlling gene expression levels of a protein from a transgene (i.e., includes stable and transient transformants) has recently been elucidated (V. M. Rivera., et al., Science, 287:826-830, (2000)). This method does not control gene expression at the level of the mRNA like the aforementioned systems. Rather, the system controls the level of protein in an active secreted form. In the absence of the inducing agent, the protein aggregates in the ER and is not secreted. However, addition of the inducing agent results in dis-aggregation of the protein and the subsequent secretion from the ER. Such a system affords low basal secretion, rapid, high level secretion in the presence of the inducing agent, and rapid cessation of secretion upon removal of the inducing agent. In fact, protein secretion reached a maximum level within 30 minutes of induction, and a rapid cessation of secretion within 1 hour of removing the inducing agent. The method is also applicable for controlling the level of production for membrane proteins.

[1502] Detailed methods are presented in V. M. Rivera., et al., Science, 287:826-830, (2000)), briefly:

[1503] Fusion protein constructs are created using polynucleotide sequences of the present invention with one or more copies (preferably at least 2, 3, 4, or more) of a conditional aggregation domain (CAD) a domain that interacts with itself in a ligand-reversible manner (i.e., in the presence of an inducing agent) using molecular biology methods known in the art and discussed elsewhere herein. The CAD domain may be the mutant domain isolated from the human FKBP12 (Phe³⁶ to Met) protein (as disclosed in V. M. Rivera., et al., Science, 287:826-830, (2000), or alternatively other proteins having domains with similar ligand-reversible, self-aggregation properties. As a principle of design the fusion protein vector would contain a furin cleavage sequence operably linked between the polynucleotides of the present invention and the CAD domains. Such a cleavage site would enable the proteolytic cleavage of the CAD domains from the polypeptide of the present invention subsequent to secretion from the ER and upon entry into the trans-Golgi (J. B. Denault, et al., FEBS Lett., 379:113, (1996)). Alternatively, the skilled artisan would recognize that any proteolytic cleavage sequence could be substituted for the furin sequence provided the substituted sequence is cleavable either endogenously (e.g., the furin sequence) or exogenously (e.g., post secretion, post purification, post production, etc.). The preferred sequence of each feature of the fusion protein construct, from the 5′ to 3′ direction with each feature being operably linked to the other, would be a promoter, signal sequence, “X” number of (CAD)x domains, the furin sequence (or other proteolytic sequence), and the coding sequence of the polypeptide of the present invention. The artisan would appreciate that the promotor and signal sequence, independent from the other, could be either the endogenous promotor or signal sequence of a polypeptide of the present invention, or alternatively, could be a heterologous signal sequence and promotor.

[1504] The specific methods described herein for controlling protein secretion levels through controlled ER aggregation are not meant to be limiting are would be generally applicable to any of the polynucleotides and polypeptides of the present invention, including variants, homologues, orthologs, and fragments therein.

### Example 27

### Alteration of Protein Glycosylation Sites to Enhance Characteristics of Polypeptides of the Invention

[1505] Many eukaryotic cell surface and proteins are post-translationally processed to incorporate N-linked and O-linked carbohydrates (Kornfeld and Kornfeld (1985) Annu. Rev. Biochem. 54:631-64; Rademacher et al., (1988) Annu. Rev. Biochem. 57:785-838). Protein glycosylation is thought to serve a variety of functions including: augmentation of protein folding, inhibition of protein aggregation, regulation of intracellular trafficking to organelles, increasing resistance to proteolysis, modulation of protein antigenicity, and mediation of intercellular adhesion (Fieldler and Simons (1995) Cell, 81:309-312; Helenius (1994) Mol. Biol. Of the Cell 5:253-265; Olden et al., (1978) Cell, 13:461-473; Caton et al., (1982) Cell, 37:417-427; Alexamnder and Elder (1984), Science, 226:1328-1330; and Flack et al., (1994), J. Biol. Chem., 269:14015-14020). In higher organisms, the nature and extent of glycosylation can markedly affect the circulating half-life and bio-availability of proteins by mechanisms involving receptor mediated uptake and clearance (Ashwell and Morrell, (1974), Adv. Enzymol., 41:99-128; Ashwell and Harford (1982), Ann. Rev. Biochem., 51:531-54). Receptor systems have been identified that are thought to play a major role in the clearance of serum proteins through recognition of various carbohydrate structures on the glycoproteins (Stockert (1995), Physiol. Rev., 75:591-609; Kery et al., (1992), Arch. Biochem. Biophys., 298:49-55). Thus, production strategies resulting in incomplete attachment of terminal sialic acid residues might provide a means of shortening the bioavailability and half-life of glycoproteins. Conversely, expression strategies resulting in saturation of terminal sialic acid attachment sites might lengthen protein bioavailability and half-life.

[1506] In the development of recombinant glycoproteins for use as pharmaceutical products, for example, it has been speculated that the pharmacodynamics of recombinant proteins can be modulated by the addition or deletion of glycosylation sites from a glycoproteins primary structure (Berman and Lasky (1985a) Trends in Biotechnol., 3:51-53). However, studies have reported that the deletion of N-linked glycosylation sites often impairs intracellular transport and results in the intracellular accumulation of glycosylation site variants (Machamer and Rose (1988), J. Biol Chem., 263:5955-5960; Gallagher et al., (1992), J. Virology., 66:7136-7145; Collier et al., (1993), Biochem., 32:7818-7823; Claffey et al., (1995) Biochemica et Biophysica Acta, 1246:1-9; Dube et al., (1988), J. Biol. Chem. 263:17516-17521). While glycosylation site variants of proteins can be expressed intracellularly, it has proved difficult to recover useful quantities from growth conditioned cell culture medium.

[1507] Moreover, it is unclear to what extent a glycosylation site in one species will be recognized by another species glycosylation machinery. Due to the importance of glycosylation in protein metabolism, particularly the secretion and/or expression of the protein, whether a glycosylation signal is recognized may profoundly determine a proteins ability to be expressed, either endogenously or recombinately, in another organism (i.e., expressing a human protein in E.coli, yeast, or viral organisms; or an E.coli, yeast, or viral protein in human, etc.). Thus, it may be desirable to add, delete, or modify a glycosylation site, and possibly add a glycosylation site of one species to a protein of another species to improve the proteins functional, bioprocess purification, and/or structural characteristics (e.g., a polypeptide of the present invention).

[1508] A number of methods may be employed to identify the location of glycosylation sites within a protein. One preferred method is to run the translated protein sequence through the PROSITE computer program (Swiss Institute of Bioinformatics). Once identified, the sites could be systematically deleted, or impaired, at the level of the DNA using mutagenesis methodology known in the art and available to the skilled artisan, Preferably using PCR-directed mutagenesis (See Maniatis, Molecular Cloning: A Laboratory Manual, Cold Spring Harbor Press, Cold Spring, N.Y. (1982)). Similarly, glycosylation sites could be added, or modified at the level of the DNA using similar methods, preferably PCR methods (See, Maniatis, supra). The results of modifying the glycosylation sites for a particular protein (e.g., solubility, secretion potential, activity, aggregation, proteolytic resistance, etc.) could then be analyzed using methods know in the art.

[1509] The skilled artisan would acknowledge the existence of other computer algorithms capable of predicting the location of glycosylation sites within a protein. For example, the Motif computer program (Genetics Computer Group suite of programs) provides this function, as well.

### Example 28

### Method of Enhancing the Biological Activity/Functional Characteristics of Invention Through Molecular Evolution

[1510] Although many of the most biologically active proteins known are highly effective for their specified function in an organism, they often possess characteristics that make them undesirable for transgenic, therapeutic, and/or industrial applications. Among these traits, a short physiological half-life is the most prominent problem, and is present either at the level of the protein, or the level of the proteins mRNA. The ability to extend the half-life, for example, would be particularly important for a proteins use in gene therapy, transgenic animal production, the bioprocess production and purification of the protein, and use of the protein as a chemical modulator among others. Therefore, there is a need to identify novel variants of isolated proteins possessing characteristics which enhance their application as a therapeutic for treating diseases of animal origin, in addition to the proteins applicability to common industrial and pharmaceutical applications.

[1511] Thus, one aspect of the present invention relates to the ability to enhance specific characteristics of invention through directed molecular evolution. Such an enhancement may, in a non-limiting example, benefit the inventions utility as an essential component in a kit, the inventions physical attributes such as its solubility, structure, or codon optimization, the inventions specific biological activity, including any associated enzymatic activity, the proteins enzyme kinetics, the proteins Ki, Kcat, Km, Vmax, Kd, protein-protein activity, protein-DNA binding activity, antagonist/inhibitory activity (including direct or indirect interaction), agonist activity (including direct or indirect interaction), the proteins antigenicity (e.g., where it would be desirable to either increase or decrease the antigenic potential of the protein), the immunogenicity of the protein, the ability of the protein to form dimers, trimers, or multimers with either itself or other proteins, the antigenic efficacy of the invention, including its subsequent use a preventative treatment for disease or disease states, or as an effector for targeting diseased genes. Moreover, the ability to enhance specific characteristics of a protein may also be applicable to changing the characterized activity of an enzyme to an activity completely unrelated to its initially characterized activity. Other desirable enhancements of the invention would be specific to each individual protein, and would thus be well known in the art and contemplated by the present invention.

[1512] Directed evolution is comprised of several steps. The first step is to establish a library of variants for the gene or protein of interest. The most important step is to then select for those variants that entail the activity you wish to identify. The design of the screen is essential since your screen should be selective enough to eliminate non-useful variants, but not so stringent as to eliminate all variants. The last step is then to repeat the above steps using the best variant from the previous screen. Each successive cycle, can then be tailored as necessary, such as increasing the stringency of the screen, for example.

[1513] Over the years, there have been a number of methods developed to introduce mutations into macromolecules. Some of these methods include, random mutagenesis, “error-prone” PCR, chemical mutagenesis, site-directed mutagenesis, and other methods well known in the art (for a comprehensive listing of current mutagenesis methods, see Maniatis, Molecular Cloning: A Laboratory Manual, Cold Spring Harbor Press, Cold Spring, N.Y. (1982)). Typically, such methods have been used, for example, as tools for identifying the core functional region(s) of a protein or the function of specific domains of a protein (if a multi-domain protein). However, such methods have more recently been applied to the identification of macromolecule variants with specific or enhanced characteristics.

[1514] Random mutagenesis has been the most widely recognized method to date. Typically, this has been carried out either through the use of “error-prone” PCR (as described in Moore, J., et al, Nature Biotechnology 14:458, (1996), or through the application of randomized synthetic oligonucleotides corresponding to specific regions of interest (as described by Derbyshire, K. M. et al, Gene, 46:145-152, (1986), and Hill, D E, et al, Methods Enzymol., 55:559-568, (1987). Both approaches have limits to the level of mutagenesis that can be obtained. However, either approach enables the investigator to effectively control the rate of mutagenesis. This is particularly important considering the fact that mutations beneficial to the activity of the enzyme are fairly rare. In fact, using too high a level of mutagenesis may counter or inhibit the desired benefit of a useful mutation.

[1515] While both of the aforementioned methods are effective for creating randomized pools of macromolecule variants, a third method, termed “DNA Shuffling”, or “sexual PCR” (WPC, Stemmer, PNAS, 91:10747, (1994)) has recently been elucidated. DNA shuffling has also been referred to as “directed molecular evolution”, “exon-shuffling”, “directed enzyme evolution”, “in vitro evolution”, and “artificial evolution”. Such reference terms are known in the art and are encompassed by the invention. This new, preferred, method apparently overcomes the limitations of the previous methods in that it not only propagates positive traits, but simultaneously eliminates negative traits in the resulting progeny.

[1516] DNA shuffling accomplishes this task by combining the principal of in vitro recombination, along with the method of “error-prone” PCR. In effect, you begin with a randomly digested pool of small fragments of your gene, created by Dnase I digestion, and then introduce said random fragments into an “error-prone” PCR assembly reaction. During the PCR reaction, the randomly sized DNA fragments not only hybridize to their cognate strand, but also may hybridize to other DNA fragments corresponding to different regions of the polynucleotide of interest—regions not typically accessible via hybridization of the entire polynucleotide. Moreover, since the PCR assembly reaction utilizes “error-prone” PCR reaction conditions, random mutations are introduced during the DNA synthesis step of the PCR reaction for all of the fragments—further diversifying the potential hybridization sites during the annealing step of the reaction.

[1517] A variety of reaction conditions could be utilized to carry-out the DNA shuffling reaction. However, specific reaction conditions for DNA shuffling are provided, for example, in PNAS, 91:10747, (1994). Briefly:

[1518] Prepare the DNA substrate to be subjected to the DNA shuffling reaction. Preparation may be in the form of simply purifying the DNA from contaminating cellular material, chemicals, buffers, oligonucleotide primers, deoxynucleotides, RNAs, etc., and may entail the use of DNA purification kits as those provided by Qiagen, Inc., or by the Promega, Corp., for example.

[1519] Once the DNA substrate has been purified, it would be subjected to Dnase I digestion. About 2-4 ug of the DNA substrate(s) would be digested with 0.0015 units of Dnase I (Sigma) per ul in 100 ul of 50 mM Tris-HCL, pH 7.4/l mM MgCl2 for 10-20 min. at room temperature. The resulting fragments of 10-50 bp could then be purified by running them through a 2% low-melting point agarose gel by electrophoresis onto DE81 ion-exchange paper (Whatmann) or could be purified using Microcon concentrators (Amicon) of the appropriate molecular weight cutoff, or could use oligonucleotide purification columns (Qiagen), in addition to other methods known in the art. If using DE81 ion-exchange paper, the 10-50 bp fragments could be eluted from said paper using 1M NaCl, followed by ethanol precipitation.

[1520] The resulting purified fragments would then be subjected to a PCR assembly reaction by re-suspension in a PCR mixture containing: 2 mM of each dNTP, 2.2 mM MgCl2, 50 mM KCl, 10 mM Tris•HCL, pH 9.0, and 0.1% Triton X-100, at a final fragment concentration of 10-30 ng/ul. No primers are added at this point. Taq DNA polymerase (Promega) would be used at 2.5 units per 100 ul of reaction mixture. A PCR program of 94 C. for 60 s; 94 C. for 30 s, 50-55 C. for 30 s, and 72 C. for 30 s using 30-45 cycles, followed by 72 C. for 5 min using an MJ Research (Cambridge, Mass.) PTC-150 thermocycler. After the assembly reaction is completed, a 1:40 dilution of the resulting primerless product would then be introduced into a PCR mixture (using the same buffer mixture used for the assembly reaction) containing 0.8 um of each primer and subjecting this mixture to 15 cycles of PCR (using 94 C. for 30 s, 50 C. for 30 s, and 72 C. for 30 s). The referred primers would be primers corresponding to the nucleic acid sequences of the polynucleotide(s) utilized in the shuffling reaction. Said primers could consist of modified nucleic acid base pairs using methods known in the art and referred to else where herein, or could contain additional sequences (i.e., for adding restriction sites, mutating specific base-pairs, etc.).

[1521] The resulting shuffled, assembled, and amplified product can be purified using methods well known in the art (e.g., Qiagen PCR purification kits) and then subsequently cloned using appropriate restriction enzymes.

[1522] Although a number of variations of DNA shuffling have been published to date, such variations would be obvious to the skilled artisan and are encompassed by the invention. The DNA shuffling method can also be tailored to the desired level of mutagenesis using the methods described by Zhao, et al. (Nucl Acid Res., 25(6): 1307-1308, (1997).

[1523] As described above, once the randomized pool has been created, it can then be subjected to a specific screen to identify the variant possessing the desired characteristic(s). Once the variant has been identified, DNA corresponding to the variant could then be used as the DNA substrate for initiating another round of DNA shuffling. This cycle of shuffling, selecting the optimized variant of interest, and then re-shuffling, can be repeated until the ultimate variant is obtained. Examples of model screens applied to identify variants created using DNA shuffling technology may be found in the following publications: J. C., Moore, et al., J. Mol. Biol., 272:336-347, (1997), F. R., Cross, et al., Mol. Cell. Biol., 18:2923-2931, (1998), and A. Crameri., et al., Nat. Biotech., 15:436-438, (1997).

[1524] DNA shuffling has several advantages. First, it makes use of beneficial mutations. When combined with screening, DNA shuffling allows the discovery of the best mutational combinations and does not assume that the best combination contains all the mutations in a population. Secondly, recombination occurs simultaneously with point mutagenesis. An effect of forcing DNA polymerase to synthesize full-length genes from the small fragment DNA pool is a background mutagenesis rate. In combination with a stringent selection method, enzymatic activity has been evolved up to 16000 fold increase over the wild-type form of the enzyme. In essence, the background mutagenesis yielded the genetic variability on which recombination acted to enhance the activity.

[1525] A third feature of recombination is that it can be used to remove deleterious mutations. As discussed above, during the process of the randomization, for every one beneficial mutation, there may be at least one or more neutral or inhibitory mutations. Such mutations can be removed by including in the assembly reaction an excess of the wild-type random-size fragments, in addition to the random-size fragments of the selected mutant from the previous selection. During the next selection, some of the most active variants of the polynucleotide/polypeptide/enzyme, should have lost the inhibitory mutations.

[1526] Finally, recombination enables parallel processing. This represents a significant advantage since there are likely multiple characteristics that would make a protein more desirable (e.g. solubility, activity, etc.). Since it is increasingly difficult to screen for more than one desirable trait at a time, other methods of molecular evolution tend to be inhibitory. However, using recombination, it would be possible to combine the randomized fragments of the best representative variants for the various traits, and then select for multiple properties at once.

[1527] DNA shuffling can also be applied to the polynucleotides and polypeptides of the present invention to decrease their immunogenicity in a specified host. For example, a particular variant of the present invention may be created and isolated using DNA shuffling technology. Such a variant may have all of the desired characteristics, though may be highly immunogenic in a host due to its novel intrinsic structure. Specifically, the desired characteristic may cause the polypeptide to have a non-native structure which could no longer be recognized as a “self” molecule, but rather as a “foreign”, and thus activate a host immune response directed against the novel variant. Such a limitation can be overcome, for example, by including a copy of the gene sequence for a xenobiotic ortholog of the native protein in with the gene sequence of the novel variant gene in one or more cycles of DNA shuffling. The molar ratio of the ortholog and novel variant DNAs could be varied accordingly. Ideally, the resulting hybrid variant identified would contain at least some of the coding sequence which enabled the xenobiotic protein to evade the host immune system, and additionally, the coding sequence of the original novel variant that provided the desired characteristics.

[1528] Likewise, the invention encompasses the application of DNA shuffling technology to the evolution of polynucleotides and polypeptides of the invention, wherein one or more cycles of DNA shuffling include, in addition to the gene template DNA, oligonucleotides coding for known allelic sequences, optimized codon sequences, known variant sequences, known polynucleotide polymorphism sequences, known ortholog sequences, known homologue sequences, additional homologous sequences, additional non-homologous sequences, sequences from another species, and any number and combination of the above.

[1529] In addition to the described methods above, there are a number of related methods that may also be applicable, or desirable in certain cases. Representative among these are the methods discussed in PCT applications WO 98/31700, and WO 98/32845, which are hereby incorporated by reference. Furthermore, related methods can also be applied to the polynucleotide sequences of the present invention in order to evolve invention for creating ideal variants for use in gene therapy, protein engineering, evolution of whole cells containing the variant, or in the evolution of entire enzyme pathways containing polynucleotides of the invention as described in PCT applications WO 98/13485, WO 98/13487, WO 98/27230, WO 98/31837, and Crameri, A., et al., Nat. Biotech., 15:436-438, (1997), respectively.

[1530] Additional methods of applying “DNA Shuffling” technology to the polynucleotides and polypeptides of the present invention, including their proposed applications, may be found in U.S. Pat. No. 5,605,793; PCT Application No. WO 95/22625; PCT Application No. WO 97/20078; PCT Application No. WO 97/35966; and PCT Application No. WO 98/42832; PCT Application No. WO 00/09727 specifically provides methods for applying DNA shuffling to the identification of herbicide selective crops which could be applied to the polynucleotides and polypeptides of the present invention; additionally, PCT Application No. WO 00/12680 provides methods and compositions for generating, modifying, adapting, and optimizing polynucleotide sequences that confer detectable phenotypic properties on plant species; each of the above are hereby incorporated in their entirety herein for all purposes.

### Example 29

### Method of Determining Alterations in a Gene Corresponding to a Polynucleotide

[1531] RNA isolated from entire families or individual patients presenting with a phenotype of interest (such as a disease) is be isolated. cDNA is then generated from these RNA samples using protocols known in the art. (See, Sambrook.) The cDNA is then used as a template for PCR, employing primers surrounding regions of interest in SEQ ID NO:1, SEQ ID NO:3, SEQ ID NO:5, SEQ ID NO:7, SEQ ID NO:9, SEQ ID NO:11, SEQ ID NO:13, SEQ ID NO:15, SEQ ID NO:17, and/or SEQ ID NO:19. Suggested PCR conditions consist of 35 cycles at 95 degrees C. for 30 seconds; 60-120 seconds at 52-58 degrees C.; and 60-120 seconds at 70 degrees C., using buffer solutions described in Sidransky et al., Science 252:706 (1991).

[1532] PCR products are then sequenced using primers labeled at their 5′ end with T4 polynucleotide kinase, employing SequiTherm Polymerase. (Epicentre Technologies). The intron-exon borders of selected exons is also determined and genomic PCR products analyzed to confirm the results. PCR products harboring suspected mutations is then cloned and sequenced to validate the results of the direct sequencing.

[1533] PCR products are cloned into T-tailed vectors as described in Holton et al., Nucleic Acids Research, 19:1156 (1991) and sequenced with T7 polymerase (United States Biochemical). Affected individuals are identified by mutations not present in unaffected individuals.

[1534] Genomic rearrangements are also observed as a method of determining alterations in a gene corresponding to a polynucleotide. Genomic clones isolated according to the methods described herein are nick-translated with digoxigenindeoxy-uridine 5′-triphosphate (Boehringer Manheim), and FISH performed as described in Johnson et al., Methods Cell Biol. 35:73-99 (1991). Hybridization with the labeled probe is carried out using a vast excess of human cot-1 DNA for specific hybridization to the corresponding genomic locus.

[1535] Chromosomes are counterstained with 4,6-diamino-2-phenylidole and propidium iodide, producing a combination of C- and R-bands. Aligned images for precise mapping are obtained using a triple-band filter set (Chroma Technology, Brattleboro, Vt.) in combination with a cooled charge-coupled device camera (Photometrics, Tucson, Ariz.) and variable excitation wavelength filters. (Johnson et al., Genet. Anal. Tech. Appl., 8:75 (1991).) Image collection, analysis and chromosomal fractional length measurements are performed using the ISee Graphical Program System. (Inovision Corporation, Durham, N.C.) Chromosome alterations of the genomic region hybridized by the probe are identified as insertions, deletions, and translocations. These alterations are used as a diagnostic marker for an associated disease.

### Example 30

### Method of Detecting Abnormal Levels of a Polypeptide in a Biological Sample

[1536] A polypeptide of the present invention can be detected in a biological sample, and if an increased or decreased level of the polypeptide is detected, this polypeptide is a marker for a particular phenotype. Methods of detection are numerous, and thus, it is understood that one skilled in the art can modify the following assay to fit their particular needs.

[1537] For example, antibody-sandwich ELISAs are used to detect polypeptides in a sample, preferably a biological sample. Wells of a microtiter plate are coated with specific antibodies, at a final concentration of 0.2 to 10 ug/ml. The antibodies are either monoclonal or polyclonal and are produced by the method described elsewhere herein. The wells are blocked so that non-specific binding of the polypeptide to the well is reduced.

[1538] The coated wells are then incubated for >2 hours at RT with a sample containing the polypeptide. Preferably, serial dilutions of the sample should be used to validate results. The plates are then washed three times with deionized or distilled water to remove unbounded polypeptide.

[1539] Next, 50 ul of specific antibody-alkaline phosphatase conjugate, at a concentration of 25-400 ng, is added and incubated for 2 hours at room temperature. The plates are again washed three times with deionized or distilled water to remove unbounded conjugate.

[1540] Add 75 ul of 4-methylumbelliferyl phosphate (MUP) or p-nitrophenyl phosphate (NPP) substrate solution to each well and incubate 1 hour at room temperature. Measure the reaction by a microtiter plate reader. Prepare a standard curve, using serial dilutions of a control sample, and plot polypeptide concentration on the X-axis (log scale) and fluorescence or absorbance of the Y-axis (linear scale). Interpolate the concentration of the polypeptide in the sample using the standard curve.

### Example 31

### Formulation

[1541] The invention also provides methods of treatment and/or prevention diseases, disorders, and/or conditions (such as, for example, any one or more of the diseases or disorders disclosed herein) by administration to a subject of an effective amount of a Therapeutic. By therapeutic is meant a polynucleotides or polypeptides of the invention (including fragments and variants), agonists or antagonists thereof, and/or antibodies thereto, in combination with a pharmaceutically acceptable carrier type (e.g., a sterile carrier).

[1542] The Therapeutic will be formulated and dosed in a fashion consistent with good medical practice, taking into account the clinical condition of the individual patient (especially the side effects of treatment with the Therapeutic alone), the site of delivery, the method of administration, the scheduling of administration, and other factors known to practitioners. The “effective amount” for purposes herein is thus determined by such considerations.

[1543] As a general proposition, the total pharmaceutically effective amount of the Therapeutic administered parenterally per dose will be in the range of about 1 ug/kg/day to 10 mg/kg/day of patient body weight, although, as noted above, this will be subject to therapeutic discretion. More preferably, this dose is at least 0.01 mg/kg/day, and most preferably for humans between about 0.01 and 1 mg/kg/day for the hormone. If given continuously, the Therapeutic is typically administered at a dose rate of about 1 ug/kg/hour to about 50 ug/kg/hour, either by 1-4 injections per day or by continuous subcutaneous infusions, for example, using a mini-pump. An intravenous bag solution may also be employed. The length of treatment needed to observe changes and the interval following treatment for responses to occur appears to vary depending on the desired effect.

[1544] Therapeutics can be administered orally, rectally, parenterally, intracisternally, intravaginally, intraperitoneally, topically (as by powders, ointments, gels, drops or transdermal patch), bucally, or as an oral or nasal spray. “Pharmaceutically acceptable carrier” refers to a non-toxic solid, semisolid or liquid filler, diluent, encapsulating material or formulation auxiliary of any. The term “parenteral” as used herein refers to modes of administration which include intravenous, intramuscular, intraperitoneal, intrasternal, subcutaneous and intraarticular injection and infusion.

[1545] Therapeutics of the invention are also suitably administered by sustained-release systems. Suitable examples of sustained-release Therapeutics are administered orally, rectally, parenterally, intracisternally, intravaginally, intraperitoneally, topically (as by powders, ointments, gels, drops or transdermal patch), bucally, or as an oral or nasal spray. “Pharmaceutically acceptable carrier” refers to a non-toxic solid, semisolid or liquid filler, diluent, encapsulating material or formulation auxiliary of any type. The term “parenteral” as used herein refers to modes of administration which include intravenous, intramuscular, intraperitoneal, intrasternal, subcutaneous and intraarticular injection and infusion.

[1546] Therapeutics of the invention may also be suitably administered by sustained-release systems. Suitable examples of sustained-release Therapeutics include suitable polymeric materials (such as, for example, semi-permeable polymer matrices in the form of shaped articles, e.g., films, or microcapsules), suitable hydrophobic materials (for example as an emulsion in an acceptable oil) or ion exchange resins, and sparingly soluble derivatives (such as, for example, a sparingly soluble salt).

[1547] Sustained-release matrices include polylactides (U.S. Pat. No. 3,773,919, EP 58,481), copolymers of L-glutamic acid and gamma-ethyl-L-glutamate (Sidman et al., Biopolymers 22:547-556 (1983)), poly (2-hydroxyethyl methacrylate) (Langer et al., J. Biomed. Mater. Res. 15:167-277 (1981), and Langer, Chem. Tech. 12:98-105 (1982)), ethylene vinyl acetate (Langer et al., Id.) or poly-D-(−)-3-hydroxybutyric acid (EP 133,988).

[1548] Sustained-release Therapeutics also include liposomally entrapped Therapeutics of the invention (see, generally, Langer, Science 249:1527-1533 (1990); Treat et al., in Liposomes in the Therapy of Infectious Disease and Cancer, Lopez-Berestein and Fidler (eds.), Liss, New York, pp. 317-327 and 353-365 (1989)). Liposomes containing the Therapeutic are prepared by methods known per se: DE 3,218,121; Epstein et al., Proc. Natl. Acad. Sci. (USA) 82:3688-3692 (1985); Hwang et al., Proc. Natl. Acad. Sci.(USA) 77:4030-4034 (1980); EP 52,322; EP 36,676; EP 88,046; EP 143,949; EP 142,641; Japanese Pat. Appl. 83-118008; U.S. Pat. Nos. 4,485,045 and 4,544,545; and EP 102,324. Ordinarily, the liposomes are of the small (about 200-800 Angstroms) unilamellar type in which the lipid content is greater than about 30 mol. percent cholesterol, the selected proportion being adjusted for the optimal Therapeutic.

[1549] In yet an additional embodiment, the Therapeutics of the invention are delivered by way of a pump (see Langer, supra; Sefton, CRC Crit. Ref. Biomed. Eng. 14:201 (1987); Buchwald et al., Surgery 88:507 (1980); Saudek et al., N. Engl. J. Med. 321:574 (1989)).

[1550] Other controlled release systems are discussed in the review by Langer (Science 249:1527-1533 (1990)).

[1551] For parenteral administration, in one embodiment, the Therapeutic is formulated generally by mixing it at the desired degree of purity, in a unit dosage injectable form (solution, suspension, or emulsion), with a pharmaceutically acceptable carrier, i.e., one that is non-toxic to recipients at the dosages and concentrations employed and is compatible with other ingredients of the formulation. For example, the formulation preferably does not include oxidizing agents and other compounds that are known to be deleterious to the Therapeutic.

[1552] Generally, the formulations are prepared by contacting the Therapeutic uniformly and intimately with liquid carriers or finely divided solid carriers or both. Then, if necessary, the product is shaped into the desired formulation. Preferably the carrier is a parenteral carrier, more preferably a solution that is isotonic with the blood of the recipient. Examples of such carrier vehicles include water, saline, Ringer's solution, and dextrose solution. Non-aqueous vehicles such as fixed oils and ethyl oleate are also useful herein, as well as liposomes.

[1553] The carrier suitably contains minor amounts of additives such as substances that enhance isotonicity and chemical stability. Such materials are non-toxic to recipients at the dosages and concentrations employed, and include buffers such as phosphate, citrate, succinate, acetic acid, and other organic acids or their salts; antioxidants such as ascorbic acid; low molecular weight (less than about ten residues) polypeptides, e.g., polyarginine or tripeptides; proteins, such as serum albumin, gelatin, or immunoglobulins; hydrophilic polymers such as polyvinylpyrrolidone; amino acids, such as glycine, glutamic acid, aspartic acid, or arginine; monosaccharides, disaccharides, and other carbohydrates including cellulose or its derivatives, glucose, mannose, or dextrins; chelating agents such as EDTA; sugar alcohols such as mannitol or sorbitol; counterions such as sodium; and/or nonionic surfactants such as polysorbates, poloxamers, or PEG.

[1554] The Therapeutic will typically be formulated in such vehicles at a concentration of about 0.1 mg/ml to 100 mg/ml, preferably 1-10 mg/ml, at a pH of about 3 to 8. It will be understood that the use of certain of the foregoing excipients, carriers, or stabilizers will result in the formation of polypeptide salts.

[1555] Any pharmaceutical used for therapeutic administration can be sterile. Sterility is readily accomplished by filtration through sterile filtration membranes (e.g., 0.2 micron membranes). Therapeutics generally are placed into a container having a sterile access port, for example, an intravenous solution bag or vial having a stopper pierceable by a hypodermic injection needle.

[1556] Therapeutics ordinarily will be stored in unit or multi-dose containers, for example, sealed ampoules or vials, as an aqueous solution or as a lyophilized formulation for reconstitution. As an example of a lyophilized formulation, 10-mil vials are filled with 5 ml of sterile-filtered 1% (w/v) aqueous Therapeutic solution, and the resulting mixture is lyophilized. The infusion solution is prepared by reconstituting the lyophilized Therapeutic using bacteriostatic Water-for-Injection.

[1557] The invention also provides a pharmaceutical pack or kit comprising one or more containers filled with one or more of the ingredients of the Therapeutics of the invention. Associated with such container(s) can be a notice in the form prescribed by a governmental agency regulating the manufacture, use or sale of pharmaceuticals or biological products, which notice reflects approval by the agency of manufacture, use or sale for human administration. In addition, the Therapeutics may be employed in conjunction with other therapeutic compounds.

[1558] The Therapeutics of the invention may be administered alone or in combination with adjuvants. Adjuvants that may be administered with the Therapeutics of the invention include, but are not limited to, alum, alum plus deoxycholate (ImmunoAg), MTP-PE (Biocine Corp.), QS21 (Genentech, Inc.), BCG, and MPL. In a specific embodiment, Therapeutics of the invention are administered in combination with alum. In another specific embodiment, Therapeutics of the invention are administered in combination with QS-21. Further adjuvants that may be administered with the Therapeutics of the invention include, but are not limited to, Monophosphoryl lipid immunomodulator, AdjuVax 100a, QS-21, QS-18, CRL1005, Aluminum salts, MF-59, and Virosomal adjuvant technology. Vaccines that may be administered with the Therapeutics of the invention include, but are not limited to, vaccines directed toward protection against MMR (measles, mumps, rubella), polio, varicella, tetanus/diptheria, hepatitis A, hepatitis B, haemophilus influenzae B, whooping cough, pneumonia, influenza, Lyme's Disease, rotavirus, cholera, yellow fever, Japanese encephalitis, poliomyelitis, rabies, typhoid fever, and pertussis. Combinations may be administered either concomitantly, e.g., as an admixture, separately but simultaneously or concurrently; or sequentially. This includes presentations in which the combined agents are administered together as a therapeutic mixture, and also procedures in which the combined agents are administered separately but simultaneously, e.g., as through separate intravenous lines into the same individual. Administration “in combination” further includes the separate administration of one of the compounds or agents given first, followed by the second.

[1559] The Therapeutics of the invention may be administered alone or in combination with other therapeutic agents. Therapeutic agents that may be administered in combination with the Therapeutics of the invention, include but not limited to, other members of the TNF family, chemotherapeutic agents, antibiotics, steroidal and non-steroidal anti-inflammatories, conventional immunotherapeutic agents, cytokines and/or growth factors. Combinations may be administered either concomitantly, e.g., as an admixture, separately but simultaneously or concurrently; or sequentially. This includes presentations in which the combined agents are administered together as a therapeutic mixture, and also procedures in which the combined agents are administered separately but simultaneously, e.g., as through separate intravenous lines into the same individual. Administration “in combination” further includes the separate administration of one of the compounds or agents given first, followed by the second.

[1560] In one embodiment, the Therapeutics of the invention are administered in combination with members of the TNF family. TNF, TNF-related or TNF-like molecules that may be administered with the Therapeutics of the invention include, but are not limited to, soluble forms of TNF-alpha, lymphotoxin-alpha (LT-alpha, also known as TNF-beta), LT-beta (found in complex heterotrimer LT-alpha2-beta), OPGL, FasL, CD27L, CD30L, CD40L, 4-1BBL, DcR3, OX40L, TNF-gamma (International Publication No. WO 96/14328), AIM-I (International Publication No. WO 97/33899), endokine-alpha (International Publication No. WO 98/07880), TR6 (International Publication No. WO 98/30694), OPG, and neutrokine-alpha (International Publication No. WO 98/18921, OX40, and nerve growth factor (NGF), and soluble forms of Fas, CD30, CD27, CD40 and 4-IBB, TR2 (International Publication No. WO 96/34095), DR3 (International Publication No. WO 97/33904), DR4 (International Publication No. WO 98/32856), TR5 (International Publication No. WO 98/30693), TR6 (International Publication No. WO 98/30694), TR7 (International Publication No. WO 98/41629), TRANK, TR9 (International Publication No. WO 98/56892),TRIO (International Publication No. WO 98/54202), 312C2 (International Publication No. WO 98/06842), and TR12, and soluble forms CD154, CD70, and CD153.

[1561] In certain embodiments, Therapeutics of the invention are administered in combination with antiretroviral agents, nucleoside reverse transcriptase inhibitors, non-nucleoside reverse transcriptase inhibitors, and/or protease inhibitors. Nucleoside reverse transcriptase inhibitors that may be administered in combination with the Therapeutics of the invention, include, but are not limited to, RETROVIR (zidovudine/AZT), VIDEX (didanosine/ddI), HIVID (zalcitabine/ddC), ZERIT (stavudine/d4T), EPIVIR (lamivudine/3TC), and COMBIVIR (zidovudine/lamivudine). Non-nucleoside reverse transcriptase inhibitors that may be administered in combination with the Therapeutics of the invention, include, but are not limited to, VIRAMUNE (nevirapine), RESCRIPTOR (delavirdine), and SUSTIVA (efavirenz). Protease inhibitors that may be administered in combination with the Therapeutics of the invention, include, but are not limited to, CRIXIVAN (indinavir), NORVIR (ritonavir), INVIRASE (saquinavir), and VIRACEPT (nelfinavir). In a specific embodiment, antiretroviral agents, nucleoside reverse transcriptase inhibitors, non-nucleoside reverse transcriptase inhibitors, and/or protease inhibitors may be used in any combination with Therapeutics of the invention to treat AIDS and/or to prevent or treat HIV infection.

[1562] In other embodiments, Therapeutics of the invention may be administered in combination with anti-opportunistic infection agents. Anti-opportunistic agents that may be administered in combination with the Therapeutics of the invention, include, but are not limited to, TRIMETHOPRIM-SULFAMETHOXAZOLE, DAPSONE, PENTAMIDINE, ATOVAQUONE, ISONIAZID, RIFAMPIN, PYRAZINAMIDE, ETHAMBUTOL, RIFABUTIN, CLARITHROMYCIN, AZITHROMYCIN, GANCICLOVIR, FOSCARNET, CIDOFOVIR, FLUCONAZOLE, ITRACONAZOLE, KETOCONAZOLE, ACYCLOVIR, FAMCICOLVIR, PYRIMETHAMINE, LEUCOVORIN, NEUPOGEN (filgrastim/G-CSF), and LEUKINE (sargramostim/GM-CSF). In a specific embodiment, Therapeutics of the invention are used in any combination with TRIMETHOPRIM-SULFAMETHOXAZOLE, DAPSONE, PENTAMIDINE, and/or ATOVAQUONE to prophylactically treat or prevent an opportunistic Pneumocystis carinii pneumonia infection. In another specific embodiment, Therapeutics of the invention are used in any combination with ISONIAZID, RIFAMPIN, PYRAZINAMIDE, and/or ETHAMBUTOL to prophylactically treat or prevent an opportunistic Mycobacterium avium complex infection. In another specific embodiment, Therapeutics of the invention are used in any combination with RIFABUTIN, CLARITHROMYCIN, and/or AZITHROMYCIN to prophylactically treat or prevent an opportunistic Mycobacterium tuberculosis infection. In another specific embodiment, Therapeutics of the invention are used in any combination with GANCICLOVIR, FOSCARNET, and/or CIDOFOVIR to prophylactically treat or prevent an opportunistic cytomegalovirus infection. In another specific embodiment, Therapeutics of the invention are used in any combination with FLUCONAZOLE, ITRACONAZOLE, and/or KETOCONAZOLE to prophylactically treat or prevent an opportunistic fungal infection. In another specific embodiment, Therapeutics of the invention are used in any combination with ACYCLOVIR and/or FAMCICOLVIR to prophylactically treat r prevent an opportunistic herpes simplex virus type I and/or type II infection. In another specific embodiment, Therapeutics of the invention are used in any combination with PYRIMETHAMINE and/or LEUCOVORIN to prophylactically treat or prevent an opportunistic Toxoplasma gondii infection. In another specific embodiment, Therapeutics of the invention are used in any combination with LEUCOVORIN and/or NEUPOGEN to prophylactically treat or prevent an opportunistic bacterial infection.

[1563] In a further embodiment, the Therapeutics of the invention are administered in combination with an antiviral agent. Antiviral agents that may be administered with the Therapeutics of the invention include, but are not limited to, acyclovir, ribavirin, amantadine, and remantidine.

[1564] In a further embodiment, the Therapeutics of the invention are administered in combination with an antibiotic agent. Antibiotic agents that may be administered with the Therapeutics of the invention include, but are not limited to, amoxicillin, beta-lactamases, aminoglycosides, beta-lactam (glycopeptide), beta-lactamases, Clindamycin, chloramphenicol, cephalosporins, ciprofloxacin, ciprofloxacin, erythromycin, fluoroquinolones, macrolides, metronidazole, penicillins, quinolones, rifampin, streptomycin, sulfonamide, tetracyclines, trimethoprim, trimethoprim-sulfamthoxazole, and vancomycin.

[1565] Conventional nonspecific immunosuppressive agents, that may be administered in combination with the Therapeutics of the invention include, but are not limited to, steroids, cyclosporine, cyclosporine analogs, cyclophosphamide methylprednisone, prednisone, azathioprine, FK-506, 15-deoxyspergualin, and other immunosuppressive agents that act by suppressing the function of responding T cells.

[1566] In specific embodiments, Therapeutics of the invention are administered in combination with immunosuppressants. Immunosuppressants preparations that may be administered with the Therapeutics of the invention include, but are not limited to, ORTHOCLONE (OKT3), SANDIMMUNE/NEORAL/SANGDYA (cyclosporin), PROGRAF (tacrolimus), CELLCEPT (mycophenolate), Azathioprine, glucorticosteroids, and RAPAMUNE (sirolimus). In a specific embodiment, immunosuppressants may be used to prevent rejection of organ or bone marrow transplantation.

[1567] In an additional embodiment, Therapeutics of the invention are administered alone or in combination with one or more intravenous immune globulin preparations. Intravenous immune globulin preparations that may be administered with the Therapeutics of the invention include, but not limited to, GAMMAR, IVEEGAM, SANDOGLOBULIN, GAMMAGARD S/D, and GAMIMUNE. In a specific embodiment, Therapeutics of the invention are administered in combination with intravenous immune globulin preparations in transplantation therapy (e.g., bone marrow transplant).

[1568] In an additional embodiment, the Therapeutics of the invention are administered alone or in combination with an anti-inflammatory agent. Anti-inflammatory agents that may be administered with the Therapeutics of the invention include, but are not limited to, glucocorticoids and the nonsteroidal anti-inflammatories, aminoarylcarboxylic acid derivatives, arylacetic acid derivatives, arylbutyric acid derivatives, arylcarboxylic acids, arylpropionic acid derivatives, pyrazoles, pyrazolones, salicylic acid derivatives, thiazinecarboxamides, e-acetamidocaproic acid, S-adenosylmethionine, 3-amino-4-hydroxybutyric acid, amixetrine, bendazac, benzydamine, bucolome, difenpiramide, ditazol, emorfazone, guaiazulene, nabumetone, nimesulide, orgotein, oxaceprol, paranyline, perisoxal, pifoxime, proquazone, proxazole, and tenidap.

[1569] In another embodiment, compositions of the invention are administered in combination with a chemotherapeutic agent. Chemotherapeutic agents that may be administered with the Therapeutics of the invention include, but are not limited to, antibiotic derivatives (e.g., doxorubicin, bleomycin, daunorubicin, and dactinomycin); antiestrogens (e.g., tamoxifen); antimetabolites (e.g., fluorouracil, 5-FU, methotrexate, floxuridine, interferon alpha-2b, glutamic acid, plicamycin, mercaptopurine, and 6-thioguanine); cytotoxic agents (e.g., carmustine, BCNU, lomustine, CCNU, cytosine arabinoside, cyclophosphamide, estramustine, hydroxyurea, procarbazine, mitomycin, busulfan, cis-platin, and vincristine sulfate); hormones (e.g., medroxyprogesterone, estramustine phosphate sodium, ethinyl estradiol, estradiol, megestrol acetate, methyltestosterone, diethylstilbestrol diphosphate, chlorotrianisene, and testolactone); nitrogen mustard derivatives (e.g., mephalen, chorambucil, mechlorethamine (nitrogen mustard) and thiotepa); steroids and combinations (e.g., bethamethasone sodium phosphate); and others (e.g., dicarbazine, asparaginase, mitotane, vincristine sulfate, vinblastine sulfate, and etoposide).

[1570] In a specific embodiment, Therapeutics of the invention are administered in combination with CHOP (cyclophosphamide, doxorubicin, vincristine, and prednisone) or any combination of the components of CHOP. In another embodiment, Therapeutics of the invention are administered in combination with Rituximab. In a further embodiment, Therapeutics of the invention are administered with Rituxmab and CHOP, or Rituxmab and any combination of the components of CHOP.

[1571] In an additional embodiment, the Therapeutics of the invention are administered in combination with cytokines. Cytokines that may be administered with the Therapeutics of the invention include, but are not limited to, IL2, IL3, IL4, IL5, IL6, IL7, IL10, IL12, IL13, IL15, anti-CD40, CD40L, IFN-gamma and TNF-alpha. In another embodiment, Therapeutics of the invention may be administered with any interleukin, including, but not limited to, I-1alpha, IL-1beta, IL-2, IL-3, IL-4, IL-5, IL-6, IL-7, IL-8, IL-9, IL-10, IL-11, IL-12, IL-13, IL-14, IL-15, IL-16, IL-17, IL-18, IL-19, IL-20, and IL-21.

[1572] In an additional embodiment, the Therapeutics of the invention are administered in combination with angiogenic proteins. Angiogenic proteins that may be administered with the Therapeutics of the invention include, but are not limited to, Glioma Derived Growth Factor (GDGF), as disclosed in European Patent Number EP-399816; Platelet Derived Growth Factor-A (PDGF-A), as disclosed in European Patent Number EP-682110; Platelet Derived Growth Factor-B (PDGF-B), as disclosed in European Patent Number EP-282317; Placental Growth Factor (PIGF), as disclosed in International Publication Number WO 92/06194; Placental Growth Factor-2 (PIGF-2), as disclosed in Hauser et al., Gorwth Factors, 4:259-268 (1993); Vascular Endothelial Growth Factor (VEGF), as disclosed in International Publication Number WO 90/13649; Vascular Endothelial Growth Factor-A (VEGF-A), as disclosed in European Patent Number EP-506477; Vascular Endothelial Growth Factor-2 (VEGF-2), as disclosed in International Publication Number WO 96/39515; Vascular Endothelial Growth Factor B (VEGF-3); Vascular Endothelial Growth Factor B-186 (VEGF-B186), as disclosed in International Publication Number WO 96/26736; Vascular Endothelial Growth Factor-D (VEGF-D), as disclosed in International Publication Number WO 98/02543; Vascular Endothelial Growth Factor-D (VEGF-D), as disclosed in International Publication Number WO 98/07832; and Vascular Endothelial Growth Factor-E (VEGF-E), as disclosed in German Patent Number DE19639601. The above mentioned references are incorporated herein by reference herein.

[1573] In an additional embodiment, the Therapeutics of the invention are administered in combination with hematopoietic growth factors. Hematopoietic growth factors that may be administered with the Therapeutics of the invention include, but are not limited to, LEUKINE (SARGRAMOSTIM) and NEUPOGEN (FILGRASTIM).

[1574] In an additional embodiment, the Therapeutics of the invention are administered in combination with Fibroblast Growth Factors. Fibroblast Growth Factors that may be administered with the Therapeutics of the invention include, but are not limited to, FGF-1, FGF-2, FGF-3, FGF-4, FGF-5, FGF-6, FGF-7, FGF-8, FGF-9, FGF-10, FGF-11, FGF-12, FGF-13, FGF-14, and FGF-15.

[1575] In a specific embodiment, formulations of the present invention may further comprise antagonists of P-glycoprotein (also referred to as the multiresistance protein, or PGP), including antagonists of its encoding polynucleotides (e.g., antisense oligonucleotides, ribozymes, zinc-finger proteins, etc.). P-glycoprotein is well known for decreasing the efficacy of various drug administrations due to its ability to export intracellular levels of absorbed drug to the cell exterior. While this activity has been particularly pronounced in cancer cells in response to the administration of chemotherapy regimens, a variety of other cell types and the administration of other drug classes have been noted (e.g., T-cells and anti-HIV drugs). In fact, certain mutations in the PGP gene significantly reduces PGP function, making it less able to force drugs out of cells. People who have two versions of the mutated gene—one inherited from each parent—have more than four times less PGP than those with two normal versions of the gene. People may also have one normal gene and one mutated one. Certain ethnic populations have increased incidence of such PGP mutations. Among individuals from Ghana, Kenya, the Sudan, as well as African Americans, frequency of the normal gene ranged from 73% to 84%. In contrast, the frequency was 34% to 59% among British whites, Portuguese, Southwest Asian, Chinese, Filipino and Saudi populations. As a result, certain ethnic populations may require increased administration of PGP antagonist in the formulation of the present invention to arrive at the an efficacious dose of therapeutic (e.g., those from african descent). Conversly, certain ethnic populations, particularly those having increased frequency of the mutated PGP (e.g., of Caucasian descent, or non-african descent) may require less pharmaceutical compositions in the formulation due to an effective increase in efficacy of such compositions as a result of the increased effective absorption (e.g., less PGP activity) of said composition.

[1576] In additional embodiments, the Therapeutics of the invention are administered in combination with other therapeutic or prophylactic regimens, such as, for example, radiation therapy.

### Example 32

### Method of Treating Decreased Levels of the Polypeptide

[1577] The present invention relates to a method for treating an individual in need of an increased level of a polypeptide of the invention in the body comprising administering to such an individual a composition comprising a therapeutically effective amount of an agonist of the invention (including polypeptides of the invention). Moreover, it will be appreciated that conditions caused by a decrease in the standard or normal expression level of a secreted protein in an individual can be treated by administering the polypeptide of the present invention, preferably in the secreted form. Thus, the invention also provides a method of treatment of an individual in need of an increased level of the polypeptide comprising administering to such an individual a Therapeutic comprising an amount of the polypeptide to increase the activity level of the polypeptide in such an individual.

[1578] For example, a patient with decreased levels of a polypeptide receives a daily dose 0.1-100 ug/kg of the polypeptide for six consecutive days. Preferably, the polypeptide is in the secreted form. The exact details of the dosing scheme, based on administration and formulation, are provided herein.

### Example 33

### Method of Treating Increased Levels of the Polypeptide

[1579] The present invention also relates to a method of treating an individual in need of a decreased level of a polypeptide of the invention in the body comprising administering to such an individual a composition comprising a therapeutically effective amount of an antagonist of the invention (including polypeptides and antibodies of the invention).

[1580] In one example, antisense technology is used to inhibit production of a polypeptide of the present invention. This technology is one example of a method of decreasing levels of a polypeptide, preferably a secreted form, due to a variety of etiologies, such as cancer. For example, a patient diagnosed with abnormally increased levels of a polypeptide is administered intravenously antisense polynucleotides at 0.5, 1.0, 1.5, 2.0 and 3.0 mg/kg day for 21 days. This treatment is repeated after a 7-day rest period if the treatment was well tolerated. The formulation of the antisense polynucleotide is provided herein.

### Example 34

### Method of Treatment Using Gene Therapy-Ex Vivo

[1581] One method of gene therapy transplants fibroblasts, which are capable of expressing a polypeptide, onto a patient. Generally, fibroblasts are obtained from a subject by skin biopsy. The resulting tissue is placed in tissue-culture medium and separated into small pieces. Small chunks of the tissue are placed on a wet surface of a tissue culture flask, approximately ten pieces are placed in each flask. The flask is turned upside down, closed tight and left at room temperature over night. After 24 hours at room temperature, the flask is inverted and the chunks of tissue remain fixed to the bottom of the flask and fresh media (e.g., Ham's F12 media, with 10% FBS, penicillin and streptomycin) is added. The flasks are then incubated at 37 degree C. for approximately one week.

[1582] At this time, fresh media is added and subsequently changed every several days. After an additional two weeks in culture, a monolayer of fibroblasts emerge. The monolayer is trypsinized and scaled into larger flasks.

[1583] pMV-7 (Kirschmeier, P. T. et al., DNA, 7:219-25 (1988)), flanked by the long terminal repeats of the Moloney murine sarcoma virus, is digested with EcoRI and HindIII and subsequently treated with calf intestinal phosphatase. The linear vector is fractionated on agarose gel and purified, using glass beads.

[1584] The cDNA encoding a polypeptide of the present invention can be amplified using PCR primers which correspond to the 5′ and 3′ end sequences respectively as set forth in Example 17 using primers and having appropriate restriction sites and initiation/stop codons, if necessary. Preferably, the 5′ primer contains an EcoRI site and the 3′ primer includes a HindIII site. Equal quantities of the Moloney murine sarcoma virus linear backbone and the amplified EcoRI and HindIII fragment are added together, in the presence of T4 DNA ligase. The resulting mixture is maintained under conditions appropriate for ligation of the two fragments. The ligation mixture is then used to transform bacteria HB101, which are then plated onto agar containing kanamycin for the purpose of confirming that the vector has the gene of interest properly inserted.

[1585] The amphotropic pA317 or GP+am12 packaging cells are grown in tissue culture to confluent density in Dulbecco's Modified Eagles Medium (DMEM) with 10% calf serum (CS), penicillin and streptomycin. The MSV vector containing the gene is then added to the media and the packaging cells transduced with the vector. The packaging cells now produce infectious viral particles containing the gene (the packaging cells are now referred to as producer cells).

[1586] Fresh media is added to the transduced producer cells, and subsequently, the media is harvested from a 10 cm plate of confluent producer cells. The spent media, containing the infectious viral particles, is filtered through a millipore filter to remove detached producer cells and this media is then used to infect fibroblast cells. Media is removed from a sub-confluent plate of fibroblasts and quickly replaced with the media from the producer cells. This media is removed and replaced with fresh media. If the titer of virus is high, then virtually all fibroblasts will be infected and no selection is required. If the titer is very low, then it is necessary to use a retroviral vector that has a selectable marker, such as neo or his. Once the fibroblasts have been efficiently infected, the fibroblasts are analyzed to determine whether protein is produced.

[1587] The engineered fibroblasts are then transplanted onto the host, either alone or after having been grown to confluence on cytodex 3 microcarrier beads.

### Example 35

### Gene Therapy Using Endogenous Genes Corresponding to Polynucleotides of the Invention

[1588] Another method of gene therapy according to the present invention involves operably associating the endogenous polynucleotide sequence of the invention with a promoter via homologous recombination as described, for example, in U.S. Pat. NO:5,641,670, issued Jun. 24, 1997; International Publication NO: WO 96/29411, published Sep. 26, 1996; International Publication NO: WO 94/12650, published Aug. 4, 1994; Koller et al., Proc. Natl. Acad. Sci. USA, 86:8932-8935 (1989); and Zijlstra et al., Nature, 342:435-438 (1989). This method involves the activation of a gene which is present in the target cells, but which is not expressed in the cells, or is expressed at a lower level than desired.

[1589] Polynucleotide constructs are made which contain a promoter and targeting sequences, which are homologous to the 5′ non-coding sequence of endogenous polynucleotide sequence, flanking the promoter. The targeting sequence will be sufficiently near the 5′ end of the polynucleotide sequence so the promoter will be operably linked to the endogenous sequence upon homologous recombination. The promoter and the targeting sequences can be amplified using PCR. Preferably, the amplified promoter contains distinct restriction enzyme sites on the 5′ and 3′ ends. Preferably, the 3′ end of the first targeting sequence contains the same restriction enzyme site as the 5′ end of the amplified promoter and the 5′ end of the second targeting sequence contains the same restriction site as the 3′ end of the amplified promoter.

[1590] The amplified promoter and the amplified targeting sequences are digested with the appropriate restriction enzymes and subsequently treated with calf intestinal phosphatase. The digested promoter and digested targeting sequences are added together in the presence of T4 DNA ligase. The resulting mixture is maintained under conditions appropriate for ligation of the two fragments. The construct is size fractionated on an agarose gel then purified by phenol extraction and ethanol precipitation.

[1591] In this Example, the polynucleotide constructs are administered as naked polynucleotides via electroporation. However, the polynucleotide constructs may also be administered with transfection-facilitating agents, such as liposomes, viral sequences, viral particles, precipitating agents, etc. Such methods of delivery are known in the art.

[1592] Once the cells are transfected, homologous recombination will take place which results in the promoter being operably linked to the endogenous polynucleotide sequence. This results in the expression of polynucleotide corresponding to the polynucleotide in the cell. Expression may be detected by immunological staining, or any other method known in the art.

[1593] Fibroblasts are obtained from a subject by skin biopsy. The resulting tissue is placed in DMEM+10% fetal calf serum. Exponentially growing or early stationary phase fibroblasts are trypsinized and rinsed from the plastic surface with nutrient medium. An aliquot of the cell suspension is removed for counting, and the remaining cells are subjected to centrifugation. The supernatant is aspirated and the pellet is resuspended in 5 ml of electroporation buffer (20 mM HEPES pH 7.3, 137 mM NaCl, 5 mM KCl, 0.7 mM Na2 HPO4, 6 mM dextrose). The cells are recentrifuged, the supernatant aspirated, and the cells resuspended in electroporation buffer containing 1 mg/ml acetylated bovine serum albumin. The final cell suspension contains approximately 3×106 cells/ml. Electroporation should be performed immediately following resuspension.

[1594] Plasmid DNA is prepared according to standard techniques. For example, to construct a plasmid for targeting to the locus corresponding to the polynucleotide of the invention, plasmid pUC18 (MBI Fermentas, Amherst, N.Y.) is digested with HindIII. The CMV promoter is amplified by PCR with an XbaI site on the 5′ end and a BamHI site on the 3′end. Two non-coding sequences are amplified via PCR: one non-coding sequence (fragment 1) is amplified with a HindIII site at the 5′ end and an Xba site at the 3′end; the other non-coding sequence (fragment 2) is amplified with a BamHI site at the 5′end and a HindIII site at the 3′end. The CMV promoter and the fragments (1 and 2) are digested with the appropriate enzymes (CMV promoter—XbaI and BamHI; fragment 1—XbaI; fragment 2—BamHI) and ligated together. The resulting ligation product is digested with HindIII, and ligated with the HindIII-digested pUC 18 plasmid.

[1595] Plasmid DNA is added to a sterile cuvette with a 0.4 cm electrode gap (Bio-Rad). The final DNA concentration is generally at least 120 μg/ml. 0.5 ml of the cell suspension (containing approximately 1.5×106 cells) is then added to the cuvette, and the cell suspension and DNA solutions are gently mixed. Electroporation is performed with a Gene-Pulser apparatus (Bio-Rad). Capacitance and voltage are set at 960 μF and 250-300 V, respectively. As voltage increases, cell survival decreases, but the percentage of surviving cells that stably incorporate the introduced DNA into their genome increases dramatically. Given these parameters, a pulse time of approximately 14-20 mSec should be observed.

[1596] Electroporated cells are maintained at room temperature for approximately 5 min, and the contents of the cuvette are then gently removed with a sterile transfer pipette. The cells are added directly to 10 ml of prewarmed nutrient media (DMEM with 15% calf serum) in a 10 cm dish and incubated at 37 degree C. The following day, the media is aspirated and replaced with 10 ml of fresh media and incubated for a further 16-24 hours.

[1597] The engineered fibroblasts are then injected into the host, either alone or after having been grown to confluence on cytodex 3 microcarrier beads. The fibroblasts now produce the protein product. The fibroblasts can then be introduced into a patient as described above.

### Example 36

### Method of Treatment Using Gene Therapy—In Vivo

[1598] Another aspect of the present invention is using in vivo gene therapy methods to treat disorders, diseases and conditions. The gene therapy method relates to the introduction of naked nucleic acid (DNA, RNA, and antisense DNA or RNA) sequences into an animal to increase or decrease the expression of the polypeptide. The polynucleotide of the present invention may be operatively linked to a promoter or any other genetic elements necessary for the expression of the polypeptide by the target tissue. Such gene therapy and delivery techniques and methods are known in the art, see, for example, WO90/11092, WO98/11779; U.S. Pat. Nos. 5,693,622, 5,705,151, 5,580,859; Tabata et al., Cardiovasc. Res. 35(3):470-479 (1997); Chao et al., Pharmacol. Res. 35(6):517-522 (1997); Wolff, Neuromuscul. Disord. 7(5):314-318 (1997); Schwartz et al., Gene Ther. 3(5):405-411 (1996); Tsurumi et al., Circulation 94(12):3281-3290 (1996) (incorporated herein by reference).

[1599] The polynucleotide constructs may be delivered by any method that delivers injectable materials to the cells of an animal, such as, injection into the interstitial space of tissues (heart, muscle, skin, lung, liver, intestine and the like). The polynucleotide constructs can be delivered in a pharmaceutically acceptable liquid or aqueous carrier.

[1600] The term “naked” polynucleotide, DNA or RNA, refers to sequences that are free from any delivery vehicle that acts to assist, promote, or facilitate entry into the cell, including viral sequences, viral particles, liposome formulations, lipofectin or precipitating agents and the like. However, the polynucleotides of the present invention may also be delivered in liposome formulations (such as those taught in Felgner P. L. et al. (1995) Ann. NY Acad. Sci. 772:126-139 and Abdallah B. et al. (1995) Biol. Cell 85(1):1-7) which can be prepared by methods well known to those skilled in the art.

[1601] The polynucleotide vector constructs used in the gene therapy method are preferably constructs that will not integrate into the host genome nor will they contain sequences that allow for replication. Any strong promoter known to those skilled in the art can be used for driving the expression of DNA. Unlike other gene therapies techniques, one major advantage of introducing naked nucleic acid sequences into target cells is the transitory nature of the polynucleotide synthesis in the cells. Studies have shown that non-replicating DNA sequences can be introduced into cells to provide production of the desired polypeptide for periods of up to six months.

[1602] The polynucleotide construct can be delivered to the interstitial space of tissues within the an animal, including of muscle, skin, brain, lung, liver, spleen, bone marrow, thymus, heart, lymph, blood, bone, cartilage, pancreas, kidney, gall bladder, stomach, intestine, testis, ovary, uterus, rectum, nervous system, eye, gland, and connective tissue. Interstitial space of the tissues comprises the intercellular fluid, mucopolysaccharide matrix among the reticular fibers of organ tissues, elastic fibers in the walls of vessels or chambers, collagen fibers of fibrous tissues, or that same matrix within connective tissue ensheathing muscle cells or in the lacunae of bone. It is similarly the space occupied by the plasma of the circulation and the lymph fluid of the lymphatic channels. Delivery to the interstitial space of muscle tissue is preferred for the reasons discussed below. They may be conveniently delivered by injection into the tissues comprising these cells. They are preferably delivered to and expressed in persistent, non-dividing cells which are differentiated, although delivery and expression may be achieved in non-differentiated or less completely differentiated cells, such as, for example, stem cells of blood or skin fibroblasts. In vivo muscle cells are particularly competent in their ability to take up and express polynucleotides.

[1603] For the naked polynucleotide injection, an effective dosage amount of DNA or RNA will be in the range of from about 0.05 g/kg body weight to about 50 mg/kg body weight. Preferably the dosage will be from about 0.005 mg/kg to about 20 mg/kg and more preferably from about 0.05 mg/kg to about 5 mg/kg. Of course, as the artisan of ordinary skill will appreciate, this dosage will vary according to the tissue site of injection. The appropriate and effective dosage of nucleic acid sequence can readily be determined by those of ordinary skill in the art and may depend on the condition being treated and the route of administration. The preferred route of administration is by the parenteral route of injection into the interstitial space of tissues. However, other parenteral routes may also be used, such as, inhalation of an aerosol formulation particularly for delivery to lungs or bronchial tissues, throat or mucous membranes of the nose. In addition, naked polynucleotide constructs can be delivered to arteries during angioplasty by the catheter used in the procedure.

[1604] The dose response effects of injected polynucleotide in muscle in vivo is determined as follows. Suitable template DNA for production of mRNA coding for polypeptide of the present invention is prepared in accordance with a standard recombinant DNA methodology. The template DNA, which may be either circular or linear, is either used as naked DNA or complexed with liposomes. The quadriceps muscles of mice are then injected with various amounts of the template DNA.

[1605] Five to six week old female and male Balb/C mice are anesthetized by intraperitoneal injection with 0.3 ml of 2.5% Avertin. A 1.5 cm incision is made on the anterior thigh, and the quadriceps muscle is directly visualized. The template DNA is injected in 0.1 ml of carrier in a 1 cc syringe through a 27 gauge needle over one minute, approximately 0.5 cm from the distal insertion site of the muscle into the knee and about 0.2 cm deep. A suture is placed over the injection site for future localization, and the skin is closed with stainless steel clips.

[1606] After an appropriate incubation time (e.g., 7 days) muscle extracts are prepared by excising the entire quadriceps. Every fifth 15 um cross-section of the individual quadriceps muscles is histochemically stained for protein expression. A time course for protein expression may be done in a similar fashion except that quadriceps from different mice are harvested at different times. Persistence of DNA in muscle following injection may be determined by Southern blot analysis after preparing total cellular DNA and HIRT supernatants from injected and control mice. The results of the above experimentation in mice can be use to extrapolate proper dosages and other treatment parameters in humans and other animals using naked DNA.

### Example 37

### Transgenic Animals

[1607] The polypeptides of the invention can also be expressed in transgenic animals. Animals of any species, including, but not limited to, mice, rats, rabbits, hamsters, guinea pigs, pigs, micro-pigs, goats, sheep, cows and non-human primates, e.g., baboons, monkeys, and chimpanzees may be used to generate transgenic animals. In a specific embodiment, techniques described herein or otherwise known in the art, are used to express polypeptides of the invention in humans, as part of a gene therapy protocol.

[1608] Any technique known in the art may be used to introduce the transgene (i.e., polynucleotides of the invention) into animals to produce the founder lines of transgenic animals. Such techniques include, but are not limited to, pronuclear microinjection (Paterson et al., Appl. Microbiol. Biotechnol. 40:691-698 (1994); Carver et al., Biotechnology (NY) 11: 1263-1270 (1993); Wright et al., Biotechnology (NY) 9:830-834 (1991); and Hoppe et al., U.S. Pat. No. 4,873,191 (1989)); retrovirus mediated gene transfer into germ lines (Van der Putten et al., Proc. Natl. Acad. Sci., USA 82:6148-6152 (1985)), blastocysts or embryos; gene targeting in embryonic stem cells (Thompson et al., Cell 56:313-321 (1989)); electroporation of cells or embryos (Lo, 1983, Mol Cell. Biol. 3:1803-1814 (1983)); introduction of the polynucleotides of the invention using a gene gun (see, e.g., Ulmer et al., Science 259:1745 (1993); introducing nucleic acid constructs into embryonic pleuripotent stem cells and transferring the stem cells back into the blastocyst; and sperm-mediated gene transfer (Lavitrano et al., Cell 57:717-723 (1989); etc. For a review of such techniques, see Gordon, “Transgenic Animals” Intl. Rev. Cytol. 115:171-229 (1989), which is incorporated by reference herein in its entirety.

[1609] Any technique known in the art may be used to produce transgenic clones containing polynucleotides of the invention, for example, nuclear transfer into enucleated oocytes of nuclei from cultured embryonic, fetal, or adult cells induced to quiescence (Campell et al., Nature 380:64-66 (1996); Wilmut et al., Nature 385:810-813 (1997)).

[1610] The present invention provides for transgenic animals that carry the transgene in all their cells, as well as animals which carry the transgene in some, but not all their cells, i.e., mosaic animals or chimeric. The transgene may be integrated as a single transgene or as multiple copies such as in concatamers, e.g., head-to-head tandems or head-to-tail tandems. The transgene may also be selectively introduced into and activated in a particular cell type by following, for example, the teaching of Lasko et al. (Lasko et al., Proc. Natl. Acad. Sci. USA 89:6232-6236 (1992)). The regulatory sequences required for such a cell-type specific activation will depend upon the particular cell type of interest, and will be apparent to those of skill in the art. When it is desired that the polynucleotide transgene be integrated into the chromosomal site of the endogenous gene, gene targeting is preferred. Briefly, when such a technique is to be utilized, vectors containing some nucleotide sequences homologous to the endogenous gene are designed for the purpose of integrating, via homologous recombination with chromosomal sequences, into and disrupting the function of the nucleotide sequence of the endogenous gene. The transgene may also be selectively introduced into a particular cell type, thus inactivating the endogenous gene in only that cell type, by following, for example, the teaching of Gu et al. (Gu et al., Science 265:103-106 (1994)). The regulatory sequences required for such a cell-type specific inactivation will depend upon the particular cell type of interest, and will be apparent to those of skill in the art.

[1611] Once transgenic animals have been generated, the expression of the recombinant gene may be assayed utilizing standard techniques. Initial screening may be accomplished by Southern blot analysis or PCR techniques to analyze animal tissues to verify that integration of the transgene has taken place. The level of mRNA expression of the transgene in the tissues of the transgenic animals may also be assessed using techniques which include, but are not limited to, Northern blot analysis of tissue samples obtained from the animal, in situ hybridization analysis, and reverse transcriptase-PCR(RT-PCR). Samples of transgenic gene-expressing tissue may also be evaluated immunocytochemically or immunohistochemically using antibodies specific for the transgene product.

[1612] Once the founder animals are produced, they may be bred, inbred, outbred, or crossbred to produce colonies of the particular animal. Examples of such breeding strategies include, but are not limited to: outbreeding of founder animals with more than one integration site in order to establish separate lines; inbreeding of separate lines in order to produce compound transgenics that express the transgene at higher levels because of the effects of additive expression of each transgene; crossing of heterozygous transgenic animals to produce animals homozygous for a given integration site in order to both augment expression and eliminate the need for screening of animals by DNA analysis; crossing of separate homozygous lines to produce compound heterozygous or homozygous lines; and breeding to place the transgene on a distinct background that is appropriate for an experimental model of interest.

[1613] Transgenic animals of the invention have uses which include, but are not limited to, animal model systems useful in elaborating the biological function of polypeptides of the present invention, studying diseases, disorders, and/or conditions associated with aberrant expression, and in screening for compounds effective in ameliorating such diseases, disorders, and/or conditions.

### Example 38

### Knock-Out Animals

[1614] Endogenous gene expression can also be reduced by inactivating or “knocking out” the gene and/or its promoter using targeted homologous recombination. (E.g., see Smithies et al., Nature 317:230-234 (1985); Thomas & Capecchi, Cell 51:503-512 (1987); Thompson et al., Cell 5:313-321 (1989); each of which is incorporated by reference herein in its entirety). For example, a mutant, non-functional polynucleotide of the invention (or a completely unrelated DNA sequence) flanked by DNA homologous to the endogenous polynucleotide sequence (either the coding regions or regulatory regions of the gene) can be used, with or without a selectable marker and/or a negative selectable marker, to transfect cells that express polypeptides of the invention in vivo. In another embodiment, techniques known in the art are used to generate knockouts in cells that contain, but do not express the gene of interest. Insertion of the DNA construct, via targeted homologous recombination, results in inactivation of the targeted gene. Such approaches are particularly suited in research and agricultural fields where modifications to embryonic stem cells can be used to generate animal offspring with an inactive targeted gene (e.g., see Thomas & Capecchi 1987 and Thompson 1989, supra). However this approach can be routinely adapted for use in humans provided the recombinant DNA constructs are directly administered or targeted to the required site in vivo using appropriate viral vectors that will be apparent to those of skill in the art.

[1615] In further embodiments of the invention, cells that are genetically engineered to express the polypeptides of the invention, or alternatively, that are genetically engineered not to express the polypeptides of the invention (e.g., knockouts) are administered to a patient in vivo. Such cells may be obtained from the patient (i.e., animal, including human) or an MHC compatible donor and can include, but are not limited to fibroblasts, bone marrow cells, blood cells (e.g., lymphocytes), adipocytes, muscle cells, endothelial cells etc. The cells are genetically engineered in vitro using recombinant DNA techniques to introduce the coding sequence of polypeptides of the invention into the cells, or alternatively, to disrupt the coding sequence and/or endogenous regulatory sequence associated with the polypeptides of the invention, e.g., by transduction (using viral vectors, and preferably vectors that integrate the transgene into the cell genome) or transfection procedures, including, but not limited to, the use of plasmids, cosmids, YACs, naked DNA, electroporation, liposomes, etc. The coding sequence of the polypeptides of the invention can be placed under the control of a strong constitutive or inducible promoter or promoter/enhancer to achieve expression, and preferably secretion, of the polypeptides of the invention. The engineered cells which express and preferably secrete the polypeptides of the invention can be introduced into the patient systemically, e.g., in the circulation, or intraperitoneally.

[1616] Alternatively, the cells can be incorporated into a matrix and implanted in the body, e.g., genetically engineered fibroblasts can be implanted as part of a skin graft; genetically engineered endothelial cells can be implanted as part of a lymphatic or vascular graft. (See, for example, Anderson et al. U.S. Pat. No. 5,399,349; and Mulligan & Wilson, U.S. Pat. No. 5,460,959 each of which is incorporated by reference herein in its entirety).

[1617] When the cells to be administered are non-autologous or non-MHC compatible cells, they can be administered using well known techniques which prevent the development of a host immune response against the introduced cells. For example, the cells may be introduced in an encapsulated form which, while allowing for an exchange of components with the immediate extracellular environment, does not allow the introduced cells to be recognized by the host immune system.

[1618] Transgenic and “knock-out” animals of the invention have uses which include, but are not limited to, animal model systems useful in elaborating the biological function of polypeptides of the present invention, studying diseases, disorders, and/or conditions associated with aberrant expression, and in screening for compounds effective in ameliorating such diseases, disorders, and/or conditions.

### Example 39

### Method of Isolating Antibody Fragments Directed Against HGPRBMY30_{—}1, HGPRBMY30_{—}2, HGPRBMY30_{—}3, HGPRBMY41_{—}1, HGPRBMY41_{—}2, HGPRBMY41_{—}3, HGPRBMY42, HGPRBMY42_{—}1, HGPRBMY43, and/or HGPRBMY44 from a Library of scFvs

[1619] Naturally occurring V-genes isolated from human PBLs are constructed into a library of antibody fragments which contain reactivities against HGPRBMY30_{—}1, HGPRBMY30_{—}2, HGPRBMY30_{—}3, HGPRBMY41_{—}1, HGPRBMY41_{—}2, HGPRBMY41_{—}3, HGPRBMY42, HGPRBMY42_{—}1, HGPRBMY43, and/or HGPRBMY44 to which the donor may or may not have been exposed (see e.g., U.S. Pat. No. 5,885,793 incorporated herein by reference in its entirety).

[1620] Rescue of the Library.

[1621] A library of scFvs is constructed from the RNA of human PBLs as described in PCT publication WO 92/01047. To rescue phage displaying antibody fragments, approximately 109 E. coli harboring the phagemid are used to inoculate 50 ml of 2×TY containing 1% glucose and 100 μg/ml of ampicillin (2×TY-AMP-GLU) and grown to an O.D. of 0.8 with shaking. Five ml of this culture is used to inoculate 50 ml of 2×TY-AMP-GLU, 2×108 TU of delta gene 3 helper (M13 delta gene III, see PCT publication WO 92/01047) are added and the culture incubated at 37° C. for 45 minutes without shaking and then at 37° C. for 45 minutes with shaking. The culture is centrifuged at 4000 r.p.m. for 10 min. and the pellet resuspended in 2 liters of 2×TY containing 100 μg/ml ampicillin and 50 ug/ml kanamycin and grown overnight. Phage are prepared as described in PCT publication WO 92/01047.

[1622] M13 delta gene III is prepared as follows: M13 delta gene III helper phage does not encode gene III protein, hence the phage(mid) displaying antibody fragments have a greater avidity of binding to antigen. Infectious M13 delta gene III particles are made by growing the helper phage in cells harboring a pUC19 derivative supplying the wild type gene III protein during phage morphogenesis. The culture is incubated for 1 hour at 37° C. without shaking and then for a further hour at 37° C. with shaking. Cells are spun down (IEC-Centra 8,400 r.p.m. for 10 min), resuspended in 300 ml 2×TY broth containing 100 μg ampicillin/ml and 25 μg kanamycin/ml (2×TY-AMP-KAN) and grown overnight, shaking at 37° C. Phage particles are purified and concentrated from the culture medium by two PEG-precipitations (Sambrook et al., 1990), resuspended in 2 ml PBS and passed through a 0.45 μm filter (Minisart NML; Sartorius) to give a final concentration of approximately 1013 transducing units/ml (ampicillin-resistant clones).

[1623] Panning of the Library.

[1624] Immunotubes (Nunc) are coated overnight in PBS with 4 ml of either 100 μg/ml or 10 μg/ml of a polypeptide of the present invention. Tubes are blocked with 2% Marvel-PBS for 2 hours at 37° C. and then washed 3 times in PBS. Approximately 1013 TU of phage is applied to the tube and incubated for 30 minutes at room temperature tumbling on an over and under turntable and then left to stand for another 1.5 hours. Tubes are washed 10 times with PBS 0.1% Tween-20 and 10 times with PBS. Phage are eluted by adding 1 ml of 100 mM triethylamine and rotating 15 minutes on an under and over turntable after which the solution is immediately neutralized with 0.5 ml of 1.0M Tris-HCl, pH 7.4. Phage are then used to infect 10 ml of mid-log E. coli TG1 by incubating eluted phage with bacteria for 30 minutes at 37° C. The E. coli are then plated on TYE plates containing 1% glucose and 100 μg/ml ampicillin. The resulting bacterial library is then rescued with delta gene 3 helper phage as described above to prepare phage for a subsequent round of selection. This process is then repeated for a total of 4 rounds of affinity purification with tube-washing increased to 20 times with PBS, 0.1% Tween-20 and 20 times with PBS for rounds 3 and 4.

[1625] Characterization of Binders.

[1626] Eluted phage from the 3rd and 4th rounds of selection are used to infect E. coli HB 2151 and soluble scFv is produced (Marks, et al., 1991) from single colonies for assay. ELISAs are performed with microtitre plates coated with either 10 pg/ml of the polypeptide of the present invention in 50 mM bicarbonate pH 9.6. Clones positive in ELISA are further characterized by PCR fingerprinting (see, e.g., PCT publication WO 92/01047) and then by sequencing. These ELISA positive clones may also be further characterized by techniques known in the art, such as, for example, epitope mapping, binding affinity, receptor signal transduction, ability to block or competitively inhibit antibody/antigen binding, and competitive agonistic or antagonistic activity.

[1627] Moreover, in another preferred method, the antibodies directed against the polypeptides of the present invention may be produced in plants. Specific methods are disclosed in U.S. Pat. Nos. 5,959,177, and 6,080,560, which are hereby incorporated in their entirety herein. The methods not only describe methods of expressing antibodies, but also the means of assembling foreign multimeric proteins in plants (i.e., antibodies, etc,), and the subsequent secretion of such antibodies from the plant.

### Example 40

### Biological Effects of HGPRBMY30_{—}1, HGPRBMY30_{—}2, HGPRBMY30_{—}3, HGPRBMY41_{—}1, HGPRBMY41_{—}2, HGPRBMY41_{—}3, HGPRBMY42, HGPRBMY42_{—}1, HGPRBMY43, and/or HGPRBMY44 Polypeptides of the Invention

[1628] Astrocyte and Neuronal Assays.

[1629] Recombinant polypeptides of the invention, expressed in Escherichia coli and purified as described above, can be tested for activity in promoting the survival, neurite outgrowth, or phenotypic differentiation of cortical neuronal cells and for inducing the proliferation of glial fibrillary acidic protein immunopositive cells, astrocytes. The selection of cortical cells for the bioassay is based on the prevalent expression of FGF-1 and FGF-2 in cortical structures and on the previously reported enhancement of cortical neuronal survival resulting from FGF-2 treatment. A thymidine incorporation assay, for example, can be used to elucidate a polypeptide of the invention's activity on these cells.

[1630] Moreover, previous reports describing the biological effects of FGF-2 (basic FGF) on cortical or hippocampal neurons in vitro have demonstrated increases in both neuron survival and neurite outgrowth (Walicke et al., “Fibroblast growth factor promotes survival of dissociated hippocampal neurons and enhances neurite extension.” Proc. Natl. Acad. Sci. USA 83:3012-3016. (1986), assay herein incorporated by reference in its entirety). However, reports from experiments done on PC-12 cells suggest that these two responses are not necessarily synonymous and may depend on not only which FGF is being tested but also on which receptor(s) are expressed on the target cells. Using the primary cortical neuronal culture paradigm, the ability of a polypeptide of the invention to induce neurite outgrowth can be compared to the response achieved with FGF-2 using, for example, a thymidine incorporation assay.

[1631] Fibroblast and Endothelial Cell Assays.

[1632] Human lung fibroblasts are obtained from Clonetics (San Diego, Calif.) and maintained in growth media from Clonetics. Dermal microvascular endothelial cells are obtained from Cell Applications (San Diego, Calif.). For proliferation assays, the human lung fibroblasts and dermal microvascular endothelial cells can be cultured at 5,000 cells/well in a 96-well plate for one day in growth medium. The cells are then incubated for one day in 0.1% BSA basal medium. After replacing the medium with fresh 0.1% BSA medium, the cells are incubated with the test proteins for 3 days. Alamar Blue (Alamar Biosciences, Sacramento, Calif.) is added to each well to a final concentration of 10%. The cells are incubated for 4 hr. Cell viability is measured by reading in a CytoFluor fluorescence reader. For the PGE2 assays, the human lung fibroblasts are cultured at 5,000 cells/well in a 96-well plate for one day. After a medium change to 0.1% BSA basal medium, the cells are incubated with FGF-2 or polypeptides of the invention with or without IL-1 (for 24 hours. The supernatants are collected and assayed for PGE2 by EIA kit (Cayman, Ann Arbor, Mich.). For the IL-6 assays, the human lung fibroblasts are cultured at 5,000 cells/well in a 96-well plate for one day. After a medium change to 0.1% BSA basal medium, the cells are incubated with FGF-2 or with or without polypeptides of the invention IL-1 (for 24 hours. The supernatants are collected and assayed for IL-6 by ELISA kit (Endogen, Cambridge, Mass.).

[1633] Human lung fibroblasts are cultured with FGF-2 or polypeptides of the invention for 3 days in basal medium before the addition of Alamar Blue to assess effects on growth of the fibroblasts. FGF-2 should show a stimulation at 10-2500 ng/ml which can be used to compare stimulation with polypeptides of the invention.

[1634] Parkinson Models.

[1635] The loss of motor function in Parkinson's disease is attributed to a deficiency of striatal dopamine resulting from the degeneration of the nigrostriatal dopaminergic projection neurons. An animal model for Parkinson's that has been extensively characterized involves the systemic administration of 1-methyl-4 phenyl 1,2,3,6-tetrahydropyridine (MPTP). In the CNS, MPTP is taken-up by astrocytes and catabolized by monoamine oxidase B to 1-methyl-4-phenyl pyridine (MPP+) and released. Subsequently, MPP+ is actively accumulated in dopaminergic neurons by the high-affinity reuptake transporter for dopamine. MPP+ is then concentrated in mitochondria by the electrochemical gradient and selectively inhibits nicotidamide adenine disphosphate: ubiquinone oxidoreductionase (complex I), thereby interfering with electron transport and eventually generating oxygen radicals.

[1636] It has been demonstrated in tissue culture paradigms that FGF-2 (basic FGF) has trophic activity towards nigral dopaminergic neurons (Ferrari et al., Dev. Biol. 1989). Recently, Dr. Unsicker's group has demonstrated that administering FGF-2 in gel foam implants in the striatum results in the near complete protection of nigral dopaminergic neurons from the toxicity associated with MPTP exposure (Otto and Unsicker, J. Neuroscience, 1990).

[1637] Based on the data with FGF-2, polypeptides of the invention can be evaluated to determine whether it has an action similar to that of FGF-2 in enhancing dopaminergic neuronal survival in vitro and it can also be tested in vivo for protection of dopaminergic neurons in the striatum from the damage associated with MPTP treatment. The potential effect of a polypeptide of the invention is first examined in vitro in a dopaminergic neuronal cell culture paradigm. The cultures are prepared by dissecting the midbrain floor plate from gestation day 14 Wistar rat embryos. The tissue is dissociated with trypsin and seeded at a density of 200,000 cells/cm2 on polyorthinine-laminin coated glass coverslips. The cells are maintained in Dulbecco's Modified Eagle's medium and F12 medium containing hormonal supplements (N1). The cultures are fixed with paraformaldehyde after 8 days in vitro and are processed for tyrosine hydroxylase, a specific marker for dopaminergic neurons, immunohistochemical staining. Dissociated cell cultures are prepared from embryonic rats. The culture medium is changed every third day and the factors are also added at that time.

[1638] Since the dopaminergic neurons are isolated from animals at gestation day 14, a developmental time which is past the stage when the dopaminergic precursor cells are proliferating, an increase in the number of tyrosine hydroxylase immunopositive neurons would represent an increase in the number of dopaminergic neurons surviving in vitro. Therefore, if a polypeptide of the invention acts to prolong the survival of dopaminergic neurons, it would suggest that the polypeptide may be involved in Parkinson's Disease.

[1639] One skilled in the art could easily modify the exemplified studies to test the activity of polynucleotides of the invention (e.g., gene therapy), agonists, and/or antagonists of polynucleotides or polypeptides of the invention.

### Example 41

### Signal Transduction Assays

[1640] The activity of GPCRs or homologues thereof, can be measured using any assay suitable for the measurement of the activity of a G protein-coupled receptor, as commonly known in the art. Signal transduction activity of a G protein-coupled receptor can be monitor by monitoring intracellular Ca²⁺, cAMP, inosital 1,4,5-trisphophate (IP₃), or 1,2-diacylglycerol (DAG). Assays for the measurement of intracellular Ca²⁺ are described in Sakurai et al. (EP 480 381). Intracellular IP₃ can be measured using a kit available from Amersham, Inc. (Arlington Heights, Ill.). A kit for measuring intracellular cAMP is available from Diagnostic Products, Inc. (Los Angeles, Calif.).

[1641] Activation of a G protein-coupled receptor triggers the release of Ca²⁺ ions sequestered in the mitochondria, endoplasmic reticulum, and other cytoplasmic vesicles into the cytoplasm. Fluorescent dyes, e.g., fura-2, can be used to measure the concentration of free cytoplasmic Ca²⁺. The ester of fura-2, which is lipophilic and can diffuse across the cell membrane, is added to the media of the host cells expressing GPCRs. Once inside the cell, the fura-2 ester is hydrolyzed by cytosolic esterases to its non-lipophilic form, and then the dye cannot diffuse back out of the cell. The non-lipophilic form of fura-2 will fluoresce when it binds to free Ca²⁺. The fluorescence can be measured without lysing the cells at an excitation spectrum of 340 nm or 380 nm and at fluorescence spectrum of 500 nm (Sakurai et al., EP 480 381).

[1642] Upon activation of a G protein-coupled receptor, the rise of free cytosolic Ca²⁺ concentrations is preceded by the hydrolysis of phosphatidylinositol 4,5-bisphosphate. Hydrolysis of this phospholipid by the phospholipase C yields 1,2-diacylglycerol (DAG), which remains in the membrane, and water-soluble inosital 1,4,5-trisphophate (IP₃). Binding of ligands or agonists will increase the concentration of DAG and IP₃. Thus, signal transduction activity can be measured by monitoring the concentration of these hydrolysis products.

[1643] To measure the IP₃ concentrations, radioactivity labeled ³H-inositol is added to the media of host cells expressing GPCRs. The ³H-inositol is taken up by the cells and incorporated into IP₃. The resulting inositol triphosphate is separated from the mono and di-phosphate forms and measured (Sakurai et al., EP 480 381). Alternatively, Amersham provides an inosital 1,4,5-triphosphate assay system. With this system Amersham provides tritylated inositol 1,4,5-triphosphate and a receptor capable of distinguishing the radioactive inositol from other inositol phosphates. With these reagents an effective and accurate competition assay can be performed to determine the inositol triphosphate levels.

[1644] Cyclic AMP levels can be measured according to the methods described in Gilman et al., Proc. Natl. Acad. Sci 67:305-312 (1970). In addition, a kit for assaying levels of cAMP is available from Diagnostic Products Corp. (Los Angeles, Calif.).

[1645] One skilled in the art could easily modify the exemplified studies to test the activity of polynucleotides of the invention (e.g., gene therapy), agonists, and/or antagonists of polynucleotides or polypeptides of the invention.

### Example 42

### GPCR ACTIVITY

[1646] Another method for screening compounds which are antagonists, and thus inhibit activation of the receptor polypeptide of the present invention is provided. This involves determining inhibition of binding of labeled ligand, such as dATP, dAMP, or UTP, to cells which have the receptor on the surface thereof, or cell membranes containing the receptor. Such a method further involves transfecting a eukaryotic cell with DNA encoding the GPCR polypeptide such that the cell expresses the receptor on its surface. The cell is then contacted with a potential antagonist in the presence of a labeled form of a ligand, such as dATP, dAMP, or UTP. The ligand can be labeled, e.g., by radioactivity, fluorescence, or any detectable label commonly known in the art. The amount of labeled ligand bound to the receptors is measured, e.g., by measuring radioactivity associated with transfected cells or membrane from these cells. If the compound binds to the receptor, the binding of labeled ligand to the receptor is inhibited as determined by a reduction of labeled ligand which binds to the receptors. This method is called a binding assay. Naturally, this same technique can be used to determine agonists.

[1647] In a further screening procedure, mammalian cells, for example, but not limited to, CHO, HEK 293, Xenopus Oocytes, RBL-2H3, etc., which are transfected, are used to express the receptor of interest. The cells are loaded with an indicator dye that produces a fluorescent signal when bound to calcium, and the cells are contacted with a test substance and a receptor agonist, such as DATP, DAMP, or UTP. Any change in fluorescent signal is measured over a defined period of time using, for example, a fluorescence spectrophotometer or a fluorescence imaging plate reader. A change in the fluorescence signal pattern generated by the ligand indicates that a compound is a potential antagonist or agonist for the receptor.

[1648] In yet another screening procedure, mammalian cells are transfected to express the receptor of interest, and are also transfected with a reporter gene construct that is coupled to activation of the receptor (for example, but not limited to luciferase or beta-galactosidase behind an appropriate promoter). The cells are contacted with a test substance and the receptor agonist (ligand), such as dATP, dAMP, or UTP, and the signal produced by the reporter gene is measured after a defined period of time. The signal can be measured using a luminometer, spectrophotometer, fluorimeter, or other such instrument appropriate for the specific reporter construct used. Inhibition of the signal generated by the ligand indicates that a compound is a potential antagonist for the receptor.

[1649] Another screening technique for antagonists or agonits involves introducing RNA encoding the GPCR polypeptide into cells (or CHO, HEK 293, RBL-2H3, etc.) to transiently or stably express the receptor. The receptor cells are then contacted with the receptor ligand, such as dATP, dAMP, or UTP, and a compound to be screened. Inhibition or activation of the receptor is then determined by detection of a signal, such as, cAMP, calcium, proton, or other ions.

[1650] One skilled in the art could easily modify the exemplified studies to test the activity of polynucleotides of the invention (e.g., gene therapy), agonists, and/or antagonists of polynucleotides or polypeptides of the invention.

[1651] It will be clear that the invention may be practiced otherwise than as particularly described in the foregoing description and examples. Numerous modifications and variations of the present invention are possible in light of the above teachings and, therefore, are within the scope of the appended claims.

[1652] The entire disclosure of each document cited (including patents, patent applications, journal articles, abstracts, laboratory manuals, books, or other disclosures) in the Background of the Invention, Detailed Description, and Examples is hereby incorporated herein by reference. Further, the hard copy of the sequence listing submitted herewith and the corresponding computer readable form are both incorporated herein by reference in their entireties.

What is claimed is:

1. An isolated nucleic acid molecule comprising a polynucleotide having a nucleotide sequence selected from the group consisting of:
(a) a polynucleotide fragment of SEQ ID NO:1 or a polynucleotide fragment of the cDNA sequence included in ATCC Deposit No: XXXXX, which is hybridizable to SEQ ID NO:1;
(b) a polynucleotide encoding a polypeptide fragment of SEQ ID NO:2 or a polypeptide fragment encoded by the cDNA sequence included in ATCC Deposit No: XXXXX, which is hybridizable to SEQ ID NO:1;
(c) a polynucleotide encoding a polypeptide domain of SEQ ID NO:2 or a polypeptide domain encoded by the cDNA sequence included in ATCC Deposit No: XXXXX, which is hybridizable to SEQ ID NO:1;
(d) a polynucleotide encoding a polypeptide epitope of SEQ ID NO:2 or a polypeptide epitope encoded by the cDNA sequence included in ATCC Deposit No: XXXXX, which is hybridizable to SEQ ID NO:1;
(e) a polynucleotide encoding a polypeptide of SEQ ID NO:2 or the cDNA sequence included in ATCC Deposit No: XXXXX, which is hybridizable to SEQ ID NO:1, having biological activity;
(f) an isolated polynucleotide comprising nucleotides 4 to 2589 of SEQ ID NO:1, wherein said nucleotides encode a polypeptide corresponding to amino acids 2 to 863 of SEQ ID NO:2 of SEQ ID NO:2 minus the start methionine;
(g) an isolated polynucleotide comprising nucleotides 1 to 2589 of SEQ ID NO:1, wherein said nucleotides encode a polypeptide corresponding to amino acids 1 to 863 of SEQ ID NO:2 including the start methionine;
(h) a polynucleotide which represents the complimentary sequence (antisense) of SEQ ID NO:1;
(i) a polynucleotide fragment of SEQ ID NO:3 or a polynucleotide fragment of the cDNA sequence included in ATCC Deposit No: XXXXX, which is hybridizable to SEQ ID NO:3;
(j) a polynucleotide encoding a polypeptide fragment of SEQ ID NO:4 or a polypeptide fragment encoded by the cDNA sequence included in ATCC Deposit No: XXXXX, which is hybridizable to SEQ ID NO:3;
(k) a polynucleotide encoding a polypeptide domain of SEQ ID NO:4 or a polypeptide domain encoded by the cDNA sequence included in ATCC Deposit No: XXXXX, which is hybridizable to SEQ ID NO:3;
(l) a polynucleotide encoding a polypeptide epitope of SEQ ID NO:4 or a polypeptide epitope encoded by the cDNA sequence included in ATCC Deposit No: XXXXX, which is hybridizable to SEQ ID NO:3;
(m) a polynucleotide encoding a polypeptide of SEQ ID NO:4 or the cDNA sequence included in ATCC Deposit No: XXXXX, which is hybridizable to SEQ ID NO:3, having biological activity;
(n) an isolated polynucleotide comprising nucleotides 4 to 2487 of SEQ ID NO:3, wherein said nucleotides encode a polypeptide corresponding to amino acids 2 to 829 of SEQ ID NO:4 of SEQ ID NO:4 minus the start methionine;
(o) an isolated polynucleotide comprising nucleotides 1 to 2487 of SEQ ID NO:3, wherein said nucleotides encode a polypeptide corresponding to amino acids 1 to 829 of SEQ ID NO:4 including the start methionine;
(p) a polynucleotide which represents the complimentary sequence (antisense) of SEQ ID NO:3;
(q) a polynucleotide fragment of SEQ ID NO:5 or a polynucleotide fragment of the cDNA sequence included in ATCC Deposit No: XXXXX, which is hybridizable to SEQ ID NO:5;
(r) a polynucleotide encoding a polypeptide fragment of SEQ ID NO:6 or a polypeptide fragment encoded by the cDNA sequence included in ATCC Deposit No: XXXXX, which is hybridizable to SEQ ID NO:5;
(s) a polynucleotide encoding a polypeptide domain of SEQ ID NO:6 or a polypeptide domain encoded by the cDNA sequence included in ATCC Deposit No: XXXXX, which is hybridizable to SEQ ID NO:5;
(t) a polynucleotide encoding a polypeptide epitope of SEQ ID NO:6 or a polypeptide epitope encoded by the cDNA sequence included in ATCC Deposit No: XXXXX, which is hybridizable to SEQ ID NO:5;
(u) a polynucleotide encoding a polypeptide of SEQ ID NO:6 or the cDNA sequence included in ATCC Deposit No: XXXXX, which is hybridizable to SEQ ID NO:5, having biological activity;
(v) an isolated polynucleotide comprising nucleotides 4 to 2682 of SEQ ID NO:5, wherein said nucleotides encode a polypeptide corresponding to amino acids 2 to 894 of SEQ ID NO:6 of SEQ ID NO:6 minus the start methionine;
(w) an isolated polynucleotide comprising nucleotides 1 to 2682 of SEQ ID NO:5, wherein said nucleotides encode a polypeptide corresponding to amino acids 1 to 894 of SEQ ID NO:6 including the start methionine;
(x) a polynucleotide which represents the complimentary sequence (antisense) of SEQ ID NO:5;
(y) a polynucleotide fragment of SEQ ID NO:7 or a polynucleotide fragment of the cDNA sequence included in ATCC Deposit No: PTA-4175, which is hybridizable to SEQ ID NO:7;
(z) a polynucleotide encoding a polypeptide fragment of SEQ ID NO:8 or a polypeptide fragment encoded by the cDNA sequence included in ATCC Deposit No: PTA-4175, which is hybridizable to SEQ ID NO:7;
(aa) a polynucleotide encoding a polypeptide domain of SEQ ID NO:8 or a polypeptide domain encoded by the cDNA sequence included in ATCC Deposit No: PTA-4175, which is hybridizable to SEQ ID NO:7;
(bb) a polynucleotide encoding a polypeptide epitope of SEQ ID NO:8 or a polypeptide epitope encoded by the cDNA sequence included in ATCC Deposit No: PTA-4175, which is hybridizable to SEQ ID NO:7;
(cc) a polynucleotide encoding a polypeptide of SEQ ID NO:8 or the cDNA sequence included in ATCC Deposit No: PTA-4175, which is hybridizable to SEQ ID NO:7, having biological activity;
(dd) an isolated polynucleotide comprising nucleotides 4 to 1200 of SEQ ID NO:7, wherein said nucleotides encode a polypeptide corresponding to amino acids 2 to 400 of SEQ ID NO:8 of SEQ ID NO:8 minus the start methionine;
(ee) an isolated polynucleotide comprising nucleotides 1 to 1200 of SEQ ID NO:7, wherein said nucleotides encode a polypeptide corresponding to amino acids 1 to 400 of SEQ ID NO:8 including the start methionine;
(ff) a polynucleotide which represents the complimentary sequence (antisense) of SEQ ID NO:7;
(gg) a polynucleotide fragment of SEQ ID NO:9 or a polynucleotide fragment of the cDNA sequence included in ATCC Deposit No: XXXXX, which is hybridizable to SEQ ID NO:9;
(hh) a polynucleotide encoding a polypeptide fragment of SEQ ID NO:10 or a polypeptide fragment encoded by the cDNA sequence included in ATCC Deposit No: XXXXX, which is hybridizable to SEQ ID NO:9;
(ii) a polynucleotide encoding a polypeptide domain of SEQ ID NO:10 or a polypeptide domain encoded by the cDNA sequence included in ATCC Deposit No: XXXXX, which is hybridizable to SEQ ID NO:9;
(jj) a polynucleotide encoding a polypeptide epitope of SEQ ID NO:10 or a polypeptide epitope encoded by the cDNA sequence included in ATCC Deposit No: XXXXX, which is hybridizable to SEQ ID NO:9;
(kk) a polynucleotide encoding a polypeptide of SEQ ID NO:10 or the cDNA sequence included in ATCC Deposit No: XXXXX, which is hybridizable to SEQ ID NO:9, having biological activity;
(ll) an isolated polynucleotide comprising nucleotides 4 to 1647 of SEQ ID NO:9, wherein said nucleotides encode a polypeptide corresponding to amino acids 2 to 549 of SEQ ID NO:10 of SEQ ID NO:10 minus the start methionine;
(mm) an isolated polynucleotide comprising nucleotides 1 to 1647 of SEQ ID NO:9, wherein said nucleotides encode a polypeptide corresponding to amino acids 1 to 549 of SEQ ID NO:10 including the start methionine;
(nn) a polynucleotide which represents the complimentary sequence (antisense) of SEQ ID NO:9;
(oo) a polynucleotide fragment of SEQ ID NO:11 or a polynucleotide fragment of the cDNA sequence included in ATCC Deposit No: XXXXX, which is hybridizable to SEQ ID NO:11;
(pp) a polynucleotide encoding a polypeptide fragment of SEQ ID NO:12 or a polypeptide fragment encoded by the cDNA sequence included in ATCC Deposit No: XXXXX, which is hybridizable to SEQ ID NO:11;
(qq) a polynucleotide encoding a polypeptide domain of SEQ ID NO:12 or a polypeptide domain encoded by the cDNA sequence included in ATCC Deposit No: XXXXX, which is hybridizable to SEQ ID NO:11;
(rr) a polynucleotide encoding a polypeptide epitope of SEQ ID NO:12 or a polypeptide epitope encoded by the cDNA sequence included in ATCC Deposit No: XXXXX, which is hybridizable to SEQ ID NO:11;
(ss) a polynucleotide encoding a polypeptide of SEQ ID NO:12 or the cDNA sequence included in ATCC Deposit No: XXXXX, which is hybridizable to SEQ ID NO:11, having biological activity;
(tt) an isolated polynucleotide comprising nucleotides 4 to 1365 of SEQ ID NO:11, wherein said nucleotides encode a polypeptide corresponding to amino acids 2 to 455 of SEQ ID NO:12 of SEQ ID NO:12 minus the start methionine;
(uu) an isolated polynucleotide comprising nucleotides 1 to 1365 of SEQ ID NO:11, wherein said nucleotides encode a polypeptide corresponding to amino acids 1 to 455 of SEQ ID NO:12 including the start methionine;
(vv) a polynucleotide which represents the complimentary sequence (antisense) of SEQ ID NO:11;
(ww) a polynucleotide fragment of SEQ ID NO:13 or a polynucleotide fragment of the cDNA sequence included in ATCC Deposit No: XXXXX, which is hybridizable to SEQ ID NO:13;
(xx) a polynucleotide encoding a polypeptide fragment of SEQ ID NO:14 or a polypeptide fragment encoded by the cDNA sequence included in ATCC Deposit No: XXXXX, which is hybridizable to SEQ ID NO:13;
(yy) a polynucleotide encoding a polypeptide domain of SEQ ID NO:14 or a polypeptide domain encoded by the cDNA sequence included in ATCC Deposit No: XXXXX, which is hybridizable to SEQ ID NO:13;
(zz) a polynucleotide encoding a polypeptide epitope of SEQ ID NO:14 or a polypeptide epitope encoded by the cDNA sequence included in ATCC Deposit No: XXXXX, which is hybridizable to SEQ ID NO:13;
(aaa) a polynucleotide encoding a polypeptide of SEQ ID NO:14 or the cDNA sequence included in ATCC Deposit No: XXXXX, which is hybridizable to SEQ ID NO:13, having biological activity;
(bbb) an isolated polynucleotide comprising nucleotides 4 to 1524 of SEQ ID NO:13, wherein said nucleotides encode a polypeptide corresponding to amino acids 2 to 508 of SEQ ID NO:14 of SEQ ID NO:14 minus the start methionine;
(ccc) an isolated polynucleotide comprising nucleotides 1 to 1524 of SEQ ID NO:13, wherein said nucleotides encode a polypeptide corresponding to amino acids 1 to 508 of SEQ ID NO:14 including the start methionine;
(ddd) a polynucleotide which represents the complimentary sequence (antisense) of SEQ ID NO:13;
(eee) a polynucleotide fragment of SEQ ID NO:15 or a polynucleotide fragment of the cDNA sequence included in ATCC Deposit No: XXXXX, which is hybridizable to SEQ ID NO:15;
(fff) a polynucleotide encoding a polypeptide fragment of SEQ ID NO:16 or a polypeptide fragment encoded by the cDNA sequence included in ATCC Deposit No: XXXXX, which is hybridizable to SEQ ID NO:15;
(ggg) a polynucleotide encoding a polypeptide domain of SEQ ID NO:16 or a polypeptide domain encoded by the cDNA sequence included in ATCC Deposit No: XXXXX, which is hybridizable to SEQ ID NO:15;
(hhh) a polynucleotide encoding a polypeptide epitope of SEQ ID NO:16 or a polypeptide epitope encoded by the cDNA sequence included in ATCC Deposit No: XXXXX, which is hybridizable to SEQ ID NO:15;
(iii) a polynucleotide encoding a polypeptide of SEQ ID NO:16 or the cDNA sequence included in ATCC Deposit No: XXXXX, which is hybridizable to SEQ ID NO:15, having biological activity;
(jjj) an isolated polynucleotide comprising nucleotides 4 to 1194 of SEQ ID NO:15, wherein said nucleotides encode a polypeptide corresponding to amino acids 2 to 398 of SEQ ID NO:16 of SEQ ID NO:16 minus the start methionine;
(kkk) an isolated polynucleotide comprising nucleotides 1 to 1194 of SEQ ID NO:15, wherein said nucleotides encode a polypeptide corresponding to amino acids 1 to 398 of SEQ ID NO:16 including the start methionine;
(lll) a polynucleotide which represents the complimentary sequence (antisense) of SEQ ID NO:15;
(mmm) a polynucleotide fragment of SEQ ID NO:17 or a polynucleotide fragment of the cDNA sequence included in ATCC Deposit No: XXXXX, which is hybridizable to SEQ ID NO:17;
(nnn) a polynucleotide encoding a polypeptide fragment of SEQ ID NO:18 or a polypeptide fragment encoded by the cDNA sequence included in ATCC Deposit No: XXXXX, which is hybridizable to SEQ ID NO:17;
(ooo) a polynucleotide encoding a polypeptide domain of SEQ ID NO:18 or a polypeptide domain encoded by the cDNA sequence included in ATCC Deposit No: XXXXX, which is hybridizable to SEQ ID NO:17;
(ppp) a polynucleotide encoding a polypeptide epitope of SEQ ID NO:18 or a polypeptide epitope encoded by the cDNA sequence included in ATCC Deposit No: XXXXX, which is hybridizable to SEQ ID NO:17;
(qqq) a polynucleotide encoding a polypeptide of SEQ ID NO:18 or the cDNA sequence included in ATCC Deposit No: XXXXX, which is hybridizable to SEQ ID NO:17, having biological activity;
(rrr) an isolated polynucleotide comprising nucleotides 4 to 1167 of SEQ ID NO:17, wherein said nucleotides encode a polypeptide corresponding to amino acids 2 to 389 of SEQ ID NO:18 of SEQ ID NO:18 minus the start methionine;
(sss) an isolated polynucleotide comprising nucleotides 1 to 1167 of SEQ ID NO:17, wherein said nucleotides encode a polypeptide corresponding to amino acids 1 to 389 of SEQ ID NO:18 including the start methionine;
(ttt) a polynucleotide which represents the complimentary sequence (antisense) of SEQ ID NO:17;
(uuu) a polynucleotide fragment of SEQ ID NO:19 or a polynucleotide fragment of the cDNA sequence included in ATCC Deposit No: XXXXX, which is hybridizable to SEQ ID NO:19;
(vvv) a polynucleotide encoding a polypeptide fragment of SEQ ID NO:20 or a polypeptide fragment encoded by the cDNA sequence included in ATCC Deposit No: XXXXX, which is hybridizable to SEQ ID NO:19;
(www) a polynucleotide encoding a polypeptide domain of SEQ ID NO:20 or a polypeptide domain encoded by the cDNA sequence included in ATCC Deposit No: XXXXX, which is hybridizable to SEQ ID NO:19;
(xxx) a polynucleotide encoding a polypeptide epitope of SEQ ID NO:20 or a polypeptide epitope encoded by the cDNA sequence included in ATCC Deposit No: XXXXX, which is hybridizable to SEQ ID NO:19;
(yyy) a polynucleotide encoding a polypeptide of SEQ ID NO:20 or the cDNA sequence included in ATCC Deposit No: XXXXX, which is hybridizable to SEQ ID NO:19, having biological activity;
(zzz) an isolated polynucleotide comprising nucleotides 4 to 2778 of SEQ ID NO:19, wherein said nucleotides encode a polypeptide corresponding to amino acids 2 to 926 of SEQ ID NO:20 of SEQ ID NO:20 minus the start methionine;
(aaaa) an isolated polynucleotide comprising nucleotides 1 to 2778 of SEQ ID NO:19, wherein said nucleotides encode a polypeptide corresponding to amino acids 1 to 926 of SEQ ID NO:20 including the start methionine;
(bbbb) a polynucleotide which represents the complimentary sequence (antisense) of SEQ ID NO:19; and
(cccc) a polynucleotide capable of hybridizing under stringent conditions to any one of the polynucleotides specified in (a)-(bbbb), wherein said polynucleotide does not hybridize under stringent conditions to a nucleic acid molecule having a nucleotide sequence of only A residues or of only T residues.

2. The isolated nucleic acid molecule of claim 1, wherein the polynucleotide fragment consists of a nucleotide sequence encoding a human G-protein coupled receptor.

3. A recombinant vector comprising the isolated nucleic acid molecule of claim 1.

4. A recombinant host cell comprising the vector sequences of claim 3.

5. An isolated polypeptide comprising an amino acid sequence selected from the group consisting of:
(a) a polypeptide fragment of SEQ ID NO:2 or the encoded sequence included in ATCC Deposit No: XXXXX;
(b) a polypeptide fragment of SEQ ID NO:2 or the encoded sequence included in ATCC Deposit No: XXXXX, having coupling activity;
(c) a polypeptide domain of SEQ ID NO:2 or the encoded sequence included in ATCC Deposit No: XXXXX;
(d) a polypeptide epitope of SEQ ID NO:2 or the encoded sequence included in ATCC Deposit No: XXXXX;
(e) a full length protein of SEQ ID NO:2 or the encoded sequence included in ATCC Deposit No: XXXXX;
(f) a polypeptide comprising amino acids 2 to 863 of SEQ ID NO:2, wherein said amino acids 2 to 316 comprising a polypeptide of SEQ ID NO:2 minus the start methionine;
(g) a polypeptide comprising amino acids 1 to 863 of SEQ ID NO:2;
(h) a polypeptide fragment of SEQ ID NO:4 or the encoded sequence included in ATCC Deposit No: XXXXX;
(i) a polypeptide fragment of SEQ ID NO:4 or the encoded sequence included in ATCC Deposit No: XXXXX, having coupling activity;
(j) a polypeptide domain of SEQ ID NO:4 or the encoded sequence included in ATCC Deposit No: XXXXX;
(k) a polypeptide epitope of SEQ ID NO:4 or the encoded sequence included in ATCC Deposit No: XXXXX;
(l) a full length protein of SEQ ID NO:4 or the encoded sequence included in ATCC Deposit No: XXXXX;
(m) a polypeptide comprising amino acids 2 to 829 of SEQ ID NO:4, wherein said amino acids 2 to 316 comprising a polypeptide of SEQ ID NO:4 minus the start methionine;
(n) a polypeptide comprising amino acids 1 to 829 of SEQ ID NO:4;
(o) a polypeptide fragment of SEQ ID NO:6 or the encoded sequence included in ATCC Deposit No: XXXXX;
(p) a polypeptide fragment of SEQ ID NO:6 or the encoded sequence included in ATCC Deposit No: XXXXX, having coupling activity;
(q) a polypeptide domain of SEQ ID NO:6 or the encoded sequence included in ATCC Deposit No: XXXXX;
(r) a polypeptide epitope of SEQ ID NO:6 or the encoded sequence included in ATCC Deposit No: XXXXX;
(s) a full length protein of SEQ ID NO:6 or the encoded sequence included in ATCC Deposit No: XXXXX;
(t) a polypeptide comprising amino acids 2 to 894 of SEQ ID NO:6, wherein said amino acids 2 to 316 comprising a polypeptide of SEQ ID NO:6 minus the start methionine;
(u) a polypeptide comprising amino acids 1 to 894 of SEQ ID NO:6;
(v) a polypeptide fragment of SEQ ID NO:8 or the encoded sequence included in ATCC Deposit No: PTA-4175;
(w) a polypeptide fragment of SEQ ID NO:8 or the encoded sequence included in ATCC Deposit No: PTA-4175, having coupling activity;
(x) a polypeptide domain of SEQ ID NO:8 or the encoded sequence included in ATCC Deposit No: PTA-4175;
(y) a polypeptide epitope of SEQ ID NO:8 or the encoded sequence included in ATCC Deposit No: PTA-4175;
(z) a full length protein of SEQ ID NO:8 or the encoded sequence included in ATCC Deposit No: PTA-4175;
(aa) a polypeptide comprising amino acids 2 to 400 of SEQ ID NO:8, wherein said amino acids 2 to 316 comprising a polypeptide of SEQ ID NO:8 minus the start methionine;
(bb) a polypeptide comprising amino acids 1 to 400 of SEQ ID NO:8;
(cc) a polypeptide fragment of SEQ ID NO:10 or the encoded sequence included in ATCC Deposit No: XXXXX;
(dd) a polypeptide fragment of SEQ ID NO:10 or the encoded sequence included in ATCC Deposit No: XXXXX, having coupling activity;
(ee) a polypeptide domain of SEQ ID NO:10 or the encoded sequence included in ATCC Deposit No: XXXXX;
(ff) a polypeptide epitope of SEQ ID NO:10 or the encoded sequence included in ATCC Deposit No: XXXXX;
(gg) a full length protein of SEQ ID NO:10 or the encoded sequence included in ATCC Deposit No: XXXXX;
(hh) a polypeptide comprising amino acids 2 to 549 of SEQ ID NO:10, wherein said amino acids 2 to 316 comprising a polypeptide of SEQ ID NO:10 minus the start methionine;
(ii) a polypeptide comprising amino acids 1 to 549 of SEQ ID NO:10;
(jj) a polypeptide fragment of SEQ ID NO:12 or the encoded sequence included in ATCC Deposit No: XXXXX;
(kk) a polypeptide fragment of SEQ ID NO:12 or the encoded sequence included in ATCC Deposit No: XXXXX, having coupling activity;
(ll) a polypeptide domain of SEQ ID NO:12 or the encoded sequence included in ATCC Deposit No: XXXXX;
(mm) a polypeptide epitope of SEQ ID NO:12 or the encoded sequence included in ATCC Deposit No: XXXXX;
(nn) a full length protein of SEQ ID NO:12 or the encoded sequence included in ATCC Deposit No: XXXXX;
(oo) a polypeptide comprising amino acids 2 to 455 of SEQ ID NO:12, wherein said amino acids 2 to 316 comprising a polypeptide of SEQ ID NO:12 minus the start methionine;
(pp) a polypeptide comprising amino acids 1 to 455 of SEQ ID NO:12;
(qq) a polypeptide fragment of SEQ ID NO:14 or the encoded sequence included in ATCC Deposit No: XXXXX;
(rr) a polypeptide fragment of SEQ ID NO:14 or the encoded sequence included in ATCC Deposit No: XXXXX, having coupling activity;
(ss) a polypeptide domain of SEQ ID NO:14 or the encoded sequence included in ATCC Deposit No: XXXXX;
(tt) a polypeptide epitope of SEQ ID NO:14 or the encoded sequence included in ATCC Deposit No: XXXXX;
(uu) a full length protein of SEQ ID NO:14 or the encoded sequence included in ATCC Deposit No: XXXXX;
(vv) a polypeptide comprising amino acids 2 to 508 of SEQ ID NO:14, wherein said amino acids 2 to 316 comprising a polypeptide of SEQ ID NO:14 minus the start methionine;
(ww) a polypeptide comprising amino acids 1 to 508 of SEQ ID NO:14;
(xx) a polypeptide fragment of SEQ ID NO:16 or the encoded sequence included in ATCC Deposit No: XXXXX;
(yy) a polypeptide fragment of SEQ ID NO:16 or the encoded sequence included in ATCC Deposit No: XXXXX, having coupling activity;
(zz) a polypeptide domain of SEQ ID NO:16 or the encoded sequence included in ATCC Deposit No: XXXXX;
(aaa) a polypeptide epitope of SEQ ID NO:16 or the encoded sequence included in ATCC Deposit No: XXXXX;
(bbb) a full length protein of SEQ ID NO:16 or the encoded sequence included in ATCC Deposit No: XXXXX;
(ccc) a polypeptide comprising amino acids 2 to 398 of SEQ ID NO:16, wherein said amino acids 2 to 316 comprising a polypeptide of SEQ ID NO:16 minus the start methionine;
(ddd) a polypeptide comprising amino acids 1 to 398 of SEQ ID NO:16;
(eee) a polypeptide fragment of SEQ ID NO:18 or the encoded sequence included in ATCC Deposit No: XXXXX;
(fff) a polypeptide fragment of SEQ ID NO:18 or the encoded sequence included in ATCC Deposit No: XXXXX, having coupling activity;
(ggg) a polypeptide domain of SEQ ID NO:18 or the encoded sequence included in ATCC Deposit No: XXXXX;
(hhh) a polypeptide epitope of SEQ ID NO:18 or the encoded sequence included in ATCC Deposit No: XXXXX;
(iii) a full length protein of SEQ ID NO:18 or the encoded sequence included in ATCC Deposit No: XXXXX;
(jjj) a polypeptide comprising amino acids 2 to 389 of SEQ ID NO:18, wherein said amino acids 2 to 316 comprising a polypeptide of SEQ ID NO:18 minus the start methionine;
(kkk) apolypeptide comprising amino acids 1 to 389 of SEQ ID NO:18;
(lll) a polypeptide fragment of SEQ ID NO:20 or the encoded sequence included in ATCC Deposit No: XXXxX;
(mmm) a polypeptide fragment of SEQ ID NO:20 or the encoded sequence included in ATCC Deposit No: XXXXX, having coupling activity;
(nnn) a polypeptide domain of SEQ ID NO:20 or the encoded sequence included in ATCC Deposit No: XXXXX;
(ooo) a polypeptide epitope of SEQ ID NO:20 or the encoded sequence included in ATCC Deposit No: XXXXX;
(ppp) a full length protein of SEQ ID NO:20 or the encoded sequence included in ATCC Deposit No: XXXXX;
(qqq) a polypeptide comprising amino acids 2 to 926 of SEQ ID NO:20, wherein said amino acids 2 to 316 comprising a polypeptide of SEQ ID NO:20 minus the start methionine; and
(rrr) a polypeptide comprising amino acids 1 to 926 of SEQ ID NO:20.

6. The isolated polypeptide of claim 5, wherein the full length protein comprises sequential amino acid deletions from either the C-terminus or the N-terminus.

7. An isolated antibody that binds specifically to the isolated polypeptide of claim 5.

8. A recombinant host cell that expresses the isolated polypeptide of claim 5.

9. A method of making an isolated polypeptide comprising:
(a) culturing the recombinant host cell of claim 8 under conditions such that said polypeptide is expressed; and
(b) recovering said polypeptide.

10. The polypeptide produced by claim 9.

11. A method for preventing, treating, or ameliorating a medical condition, comprising the step of administering to a mammalian subject a therapeutically effective amount of the polypeptide of claim 5, or a modulator thereof.

12. A method of diagnosing a pathological condition or a susceptibility to a pathological condition in a subject comprising:
(a) determining the presence or absence of a mutation in the polynucleotide of claim 1; and
(b) diagnosing a pathological condition or a susceptibility to a pathological condition based on the presence or absence of said mutation.

13. A method of diagnosing a pathological condition or a susceptibility to a pathological condition in a subject comprising:
(a) determining the presence or amount of expression of the polypeptide of claim 5 in a biological sample; and
(b) diagnosing a pathological condition or a susceptibility to a pathological condition based on the presence or amount of expression of the polypeptide.

14. An isolated nucleic acid molecule consisting of a polynucleotide having a nucleotide sequence selected from the group consisting of:
(a) a polynucleotide fragment of SEQ ID NO:1 or a polynucleotide fragment of the cDNA sequence included in ATCC Deposit No: XXXXX, which is hybridizable to SEQ ID NO:1;
(b) a polynucleotide encoding a polypeptide fragment of SEQ ID NO:2 or a polypeptide fragment encoded by the cDNA sequence included in ATCC Deposit No: XXXXX, which is hybridizable to SEQ ID NO:1;
(c) a polynucleotide encoding a polypeptide domain of SEQ ID NO:2 or a polypeptide domain encoded by the cDNA sequence included in ATCC Deposit No: XXXXX, which is hybridizable to SEQ ID NO:1;
(d) a polynucleotide encoding a polypeptide epitope of SEQ ID NO:2 or a polypeptide epitope encoded by the cDNA sequence included in ATCC Deposit No: XXXXX, which is hybridizable to SEQ ID NO:1;
(e) a polynucleotide encoding a polypeptide of SEQ ID NO:2 or the cDNA sequence included in ATCC Deposit No: XXXXX, which is hybridizable to SEQ ID NO:1, having biological activity;
(f) an isolated polynucleotide consisting of nucleotides 4 to 2589 of SEQ ID NO:1, wherein said nucleotides encode a polypeptide corresponding to amino acids 2 to 863 of SEQ ID NO:2 of SEQ ID NO:2 minus the start methionine;
(g) an isolated polynucleotide consisting of nucleotides 1 to 2589 of SEQ ID NO:1, wherein said nucleotides encode a polypeptide corresponding to amino acids 1 to 863 of SEQ ID NO:2 including the start methionine;
(h) a polynucleotide which represents the complimentary sequence (antisense) of SEQ ID NO:1;
(i) a polynucleotide fragment of SEQ ID NO:3 or a polynucleotide fragment of the cDNA sequence included in ATCC Deposit No: XXXXX, which is hybridizable to SEQ ID NO:3;
a polynucleotide encoding a polypeptide fragment of SEQ ID NO:4 or a polypeptide fragment encoded by the cDNA sequence included in ATCC Deposit No: XXXXX, which is hybridizable to SEQ ID NO:3;
(k) a polynucleotide encoding a polypeptide domain of SEQ ID NO:4 or a polypeptide domain encoded by the cDNA sequence included in ATCC Deposit No: XXXXX, which is hybridizable to SEQ ID NO:3;
(l) a polynucleotide encoding a polypeptide epitope of SEQ ID NO:4 or a polypeptide epitope encoded by the cDNA sequence included in ATCC Deposit No: XXXXX, which is hybridizable to SEQ ID NO:3;
(m) a polynucleotide encoding a polypeptide of SEQ ID NO:4 or the cDNA sequence included in ATCC Deposit No: XXXXX, which is hybridizable to SEQ ID NO:3, having biological activity;
(n) an isolated polynucleotide consisting of nucleotides 4 to 2487 of SEQ ID NO:3, wherein said nucleotides encode a polypeptide corresponding to amino acids 2 to 829 of SEQ ID NO:4 of SEQ ID NO:4 minus the start methionine;
(o) an isolated polynucleotide consisting of nucleotides 1 to 2487 of SEQ ID NO:3, wherein said nucleotides encode a polypeptide corresponding to amino acids 1 to 829 of SEQ ID NO:4 including the start methionine;
(p) a polynucleotide which represents the complimentary sequence (antisense) of SEQ ID NO:3;
(q) a polynucleotide fragment of SEQ ID NO:5 or a polynucleotide fragment of the cDNA sequence included in ATCC Deposit No: XXXXX, which is hybridizable to SEQ ID NO:5;
(r) a polynucleotide encoding a polypeptide fragment of SEQ ID NO:6 or a polypeptide fragment encoded by the cDNA sequence included in ATCC Deposit No: XXXXX, which is hybridizable to SEQ ID NO:5;
(s) a polynucleotide encoding a polypeptide domain of SEQ ID NO:6 or a polypeptide domain encoded by the cDNA sequence included in ATCC Deposit No: XXXXX, which is hybridizable to SEQ ID NO:5;
(t) a polynucleotide encoding a polypeptide epitope of SEQ ID NO:6 or a polypeptide epitope encoded by the cDNA sequence included in ATCC Deposit No: XXXXX, which is hybridizable to SEQ ID NO:5;
(u) a polynucleotide encoding a polypeptide of SEQ ID NO:6 or the cDNA sequence included in ATCC Deposit No: XXXXX, which is hybridizable to SEQ ID NO:5, having biological activity;
(v) an isolated polynucleotide consisting of nucleotides 4 to 2682 of SEQ ID NO:5, wherein said nucleotides encode a polypeptide corresponding to amino acids 2 to 894 of SEQ ID NO:6 of SEQ ID NO:6 minus the start methionine;
(w) an isolated polynucleotide consisting of nucleotides 1 to 2682 of SEQ ID NO:5, wherein said nucleotides encode a polypeptide corresponding to amino acids 1 to 894 of SEQ ID NO:6 including the start methionine;
(x) a polynucleotide which represents the complimentary sequence (antisense) of SEQ ID NO:5;
(y) a polynucleotide fragment of SEQ ID NO:7 or a polynucleotide fragment of the cDNA sequence included in ATCC Deposit No: PTA-4175, which is hybridizable to SEQ ID NO:7;
(z) a polynucleotide encoding a polypeptide fragment of SEQ ID NO:8 or a polypeptide fragment encoded by the cDNA sequence included in ATCC Deposit No: PTA-4175, which is hybridizable to SEQ ID NO:7;
(aa) a polynucleotide encoding a polypeptide domain of SEQ ID NO:8 or a polypeptide domain encoded by the cDNA sequence included in ATCC Deposit No: PTA-4175, which is hybridizable to SEQ ID NO:7;
(bb) a polynucleotide encoding a polypeptide epitope of SEQ ID NO:8 or a polypeptide epitope encoded by the cDNA sequence included in ATCC Deposit No: PTA-4175, which is hybridizable to SEQ ID NO:7;
(cc) a polynucleotide encoding a polypeptide of SEQ ID NO:8 or the cDNA sequence included in ATCC Deposit No: PTA-4175, which is hybridizable to SEQ ID NO:7, having biological activity;
(dd) an isolated polynucleotide consisting of nucleotides 4 to 1200 of SEQ ID NO:7, wherein said nucleotides encode a polypeptide corresponding to amino acids 2 to 400 of SEQ ID NO:8 of SEQ ID NO:8 minus the start methionine;
(ee) an isolated polynucleotide consisting of nucleotides 1 to 1200 of SEQ ID NO:7, wherein said nucleotides encode a polypeptide corresponding to amino acids 1 to 400 of SEQ ID NO:8 including the start methionine;
(ff) a polynucleotide which represents the complimentary sequence (antisense) of SEQ ID NO:7;
(gg) a polynucleotide fragment of SEQ ID NO:9 or a polynucleotide fragment of the cDNA sequence included in ATCC Deposit No: XXXXX, which is hybridizable to SEQ ID NO:9;
(hh) a polynucleotide encoding a polypeptide fragment of SEQ ID NO:10 or a polypeptide fragment encoded by the cDNA sequence included in ATCC Deposit No: XXXXX, which is hybridizable to SEQ ID NO:9;
(ii) a polynucleotide encoding a polypeptide domain of SEQ ID NO:10 or a polypeptide domain encoded by the cDNA sequence included in ATCC Deposit No: XXXXX, which is hybridizable to SEQ ID NO:9;
(jj) a polynucleotide encoding a polypeptide epitope of SEQ ID NO:10 or a polypeptide epitope encoded by the cDNA sequence included in ATCC Deposit No: XXXXX, which is hybridizable to SEQ ID NO:9;
(kk) a polynucleotide encoding a polypeptide of SEQ ID NO:10 or the cDNA sequence included in ATCC Deposit No: XXXXX, which is hybridizable to SEQ ID NO:9, having biological activity;
(ll) an isolated polynucleotide consisting of nucleotides 4 to 1647 of SEQ ID NO:9, wherein said nucleotides encode a polypeptide corresponding to amino acids 2 to 549 of SEQ ID NO:10 of SEQ ID NO:10 minus the start methionine;
(mm) an isolated polynucleotide consisting of nucleotides 1 to 1647 of SEQ ID NO:9, wherein said nucleotides encode a polypeptide corresponding to amino acids 1 to 549 of SEQ ID NO:10 including the start methionine;
(nn) a polynucleotide which represents the complimentary sequence (antisense) of SEQ ID NO:9;
(oo) a polynucleotide fragment of SEQ ID NO:11 or a polynucleotide fragment of the cDNA sequence included in ATCC Deposit No: XXXXX, which is hybridizable to SEQ ID NO:11;
(pp) a polynucleotide encoding a polypeptide fragment of SEQ ID NO:12 or a polypeptide fragment encoded by the cDNA sequence included in ATCC Deposit No: XXXXX, which is hybridizable to SEQ ID NO:11;
(qq) a polynucleotide encoding a polypeptide domain of SEQ ID NO:12 or a polypeptide domain encoded by the cDNA sequence included in ATCC Deposit No: XXXXX, which is hybridizable to SEQ ID NO:11;
(rr) a polynucleotide encoding a polypeptide epitope of SEQ ID NO:12 or a polypeptide epitope encoded by the cDNA sequence included in ATCC Deposit No: XXXXX, which is hybridizable to SEQ ID NO:11;
(ss) a polynucleotide encoding a polypeptide of SEQ ID NO:12 or the cDNA sequence included in ATCC Deposit No: XXXXX, which is hybridizable to SEQ ID NO:11, having biological activity;
(tt) an isolated polynucleotide consisting of nucleotides 4 to 1365 of SEQ ID NO:11, wherein said nucleotides encode a polypeptide corresponding to amino acids 2 to 455 of SEQ ID NO:12 of SEQ ID NO:12 minus the start methionine;
(uu) an isolated polynucleotide consisting of nucleotides 1 to 1365 of SEQ ID NO:11, wherein said nucleotides encode a polypeptide corresponding to amino acids 1 to 455 of SEQ ID NO:12 including the start methionine;
(vv) a polynucleotide which represents the complimentary sequence (antisense) of SEQ ID NO:11;
(ww) a polynucleotide fragment of SEQ ID NO:13 or a polynucleotide fragment of the cDNA sequence included in ATCC Deposit No: XXXXX, which is hybridizable to SEQ ID NO:13;
(xx) a polynucleotide encoding a polypeptide fragment of SEQ ID NO:14 or a polypeptide fragment encoded by the cDNA sequence included in ATCC Deposit No: XXXXX, which is hybridizable to SEQ ID NO:13;
(yy) a polynucleotide encoding a polypeptide domain of SEQ ID NO:14 or a polypeptide domain encoded by the cDNA sequence included in ATCC Deposit No: XXXXX, which is hybridizable to SEQ ID NO:13;
(zz) a polynucleotide encoding a polypeptide epitope of SEQ ID NO:14 or a polypeptide epitope encoded by the cDNA sequence included in ATCC Deposit No: XXXXX, which is hybridizable to SEQ ID NO:13;
(aaa) a polynucleotide encoding a polypeptide of SEQ ID NO:14 or the cDNA sequence included in ATCC Deposit No: XXXXX, which is hybridizable to SEQ ID NO:13, having biological activity;
(bbb) an isolated polynucleotide consisting of nucleotides 4 to 1524 of SEQ ID NO:13, wherein said nucleotides encode a.polypeptide corresponding to amino acids 2 to 508 of SEQ ID NO:14 of SEQ ID NO:14 minus the start methionine;
(ccc) an isolated polynucleotide consisting of nucleotides 1 to 1524 of SEQ ID NO:13, wherein said nucleotides encode a polypeptide corresponding to amino acids 1 to 508 of SEQ ID NO:14 including the start methionine;
(ddd) a polynucleotide which represents the complimentary sequence (antisense) of SEQ ID NO:13;
(eee) a polynucleotide fragment of SEQ ID NO:15 or a polynucleotide fragment of the cDNA sequence included in ATCC Deposit No: XXXXX, which is hybridizable to SEQ ID NO:15;
(fff) a polynucleotide encoding a polypeptide fragment of SEQ ID NO:16 or a polypeptide fragment encoded by the cDNA sequence included in ATCC Deposit No: XXXXX, which is hybridizable to SEQ ID NO:15;
(ggg) a polynucleotide encoding a polypeptide domain of SEQ ID NO:16 or a polypeptide domain encoded by the cDNA sequence included in ATCC Deposit No: XXXXX, which is hybridizable to SEQ ID NO:15;
(hhh) a polynucleotide encoding a polypeptide epitope of SEQ ID NO:16 or a polypeptide epitope encoded by the cDNA sequence included in ATCC Deposit No: XXXXX, which is hybridizable to SEQ ID NO:15;
(iii) a polynucleotide encoding a polypeptide of SEQ ID NO:16 or the cDNA sequence included in ATCC Deposit No: XXXXX, which is hybridizable to SEQ ID NO:15, having biological activity;
(jjj) an isolated polynucleotide consisting of nucleotides 4 to 1194 of SEQ ID NO:15, wherein said nucleotides encode a polypeptide corresponding to amino acids 2 to 398 of SEQ ID NO:16 of SEQ ID NO:16 minus the start methionine;
(kkk) an isolated polynucleotide consisting of nucleotides 1 to 1194 of SEQ ID NO:15, wherein said nucleotides encode a polypeptide corresponding to amino acids 1 to 398 of SEQ ID NO:16 including the start methionine;
(lll) a polynucleotide which represents the complimentary sequence (antisense) of SEQ ID NO:15;
(mmm) a polynucleotide fragment of SEQ ID NO:17 or a polynucleotide fragment of the cDNA sequence included in ATCC Deposit No: XXXXX, which is hybridizable to SEQ ID NO:17;
(nnn) a polynucleotide encoding a polypeptide fragment of SEQ ID NO:18 or a polypeptide fragment encoded by the cDNA sequence included in ATCC Deposit No: XXXXX, which is hybridizable to SEQ ID NO:17;
(ooo) a polynucleotide encoding a polypeptide domain of SEQ ID NO:18 or a polypeptide domain encoded by the cDNA sequence included in ATCC Deposit No: XXXXX, which is hybridizable to SEQ ID NO:17;
(ppp) a polynucleotide encoding a polypeptide epitope of SEQ ID NO:18 or a polypeptide epitope encoded by the cDNA sequence included in ATCC Deposit No: XXXXX, which is hybridizable to SEQ ID NO:17;
(qqq) a polynucleotide encoding a polypeptide of SEQ ID NO:18 or the cDNA sequence included in ATCC Deposit No: XXXXX, which is hybridizable to SEQ ID NO:17, having biological activity;
(rrr) an isolated polynucleotide consisting of nucleotides 4 to 1167 of SEQ ID NO:17, wherein said nucleotides encode a polypeptide corresponding to amino acids 2 to 389 of SEQ ID NO:18 of SEQ ID NO:18 minus the start methionine;
(sss) an isolated polynucleotide consisting of nucleotides 1 to 1167 of SEQ ID NO:17, wherein said nucleotides encode a polypeptide corresponding to amino acids 1 to 389 of SEQ ID NO:18 including the start methionine;
(ttt) a polynucleotide which represents the complimentary sequence (antisense) of SEQ ID NO:17;
(uuu) a polynucleotide fragment of SEQ ID NO:19 or a polynucleotide fragment of the cDNA sequence included in ATCC Deposit No: XXXXX, which is hybridizable to SEQ ID NO:19;
(vvv) a polynucleotide encoding a polypeptide fragment of SEQ ID NO:20 or a polypeptide fragment encoded by the cDNA sequence included in ATCC Deposit No: XXXXX, which is hybridizable to SEQ ID NO:19;
(www) a polynucleotide encoding a polypeptide domain of SEQ ID NO:20 or a polypeptide domain encoded by the cDNA sequence included in ATCC Deposit No: XXXXX, which is hybridizable to SEQ ID NO:19;
(xxx) a polynucleotide encoding a polypeptide epitope of SEQ ID NO:20 or a polypeptide epitope encoded by the cDNA sequence included in ATCC Deposit No: XXXXX, which is hybridizable to SEQ ID NO:19;
(yyy) a polynucleotide encoding a polypeptide of SEQ ID NO:20 or the cDNA sequence included in ATCC Deposit No: XXXXX, which is hybridizable to SEQ ID NO:19, having biological activity;
(zzz) an isolated polynucleotide consisting of nucleotides 4 to 2778 of SEQ ID NO:19, wherein said nucleotides encode a polypeptide corresponding to amino acids 2 to 926 of SEQ ID NO:20 of SEQ ID NO:20 minus the start methionine;
(aaaa) an isolated polynucleotide consisting of nucleotides 1 to 2778 of SEQ ID NO:19, wherein said nucleotides encode a polypeptide corresponding to amino acids 1 to 926 of SEQ ID NO:20 including the start methionine; and
(bbbb) a polynucleotide which represents the complimentary sequence (antisense) of SEQ ID NO:19.

15. The isolated nucleic acid molecule of claim 14, wherein the polynucleotide comprises a nucleotide sequence encoding a human G-protein coupled receptor.

16. A recombinant vector comprising the isolated nucleic acid molecule of claim 15.

17. A recombinant host cell comprising the recombinant vector of claim 16.

18. An isolated polypeptide consisting of an amino acid sequence selected from the group consisting of:
(a) a polypeptide fragment of SEQ ID NO:2 or the encoded sequence included in ATCC Deposit No: XXXXX;
(b) a polypeptide fragment of SEQ ID NO:2 or the encoded sequence included in ATCC Deposit No: XXXXX, having coupling activity;
(c) a polypeptide domain of SEQ ID NO:2 or the encoded sequence included in ATCC Deposit No: XXXXX;
(d) a polypeptide epitope of SEQ ID NO:2 or the encoded sequence included in ATCC Deposit No: XXXXX;
(e) a full length protein of SEQ ID NO:2 or the encoded sequence included in ATCC Deposit No: XXXXX;
(f) a polypeptide consisting of amino acids 2 to 863 of SEQ ID NO:2, wherein said amino acids 2 to 316 consisting of a polypeptide of SEQ ID NO:2 minus the start methionine;
(g) a polypeptide consisting of amino acids 1 to 863 of SEQ ID NO:2;
(h) a polypeptide fragment of SEQ ID NO:4 or the encoded sequence included in ATCC Deposit No: XXXXX;
(i) a polypeptide fragment of SEQ ID NO:4 or the encoded sequence included in ATCC Deposit No: XXXXX, having coupling activity;
a polypeptide domain of SEQ ID NO:4 or the encoded sequence included in ATCC Deposit No: XXXXX;
(k) a polypeptide epitope of SEQ ID NO:4 or the encoded sequence included in ATCC Deposit No: XXXXX;
(l) a full length protein of SEQ ID NO:4 or the encoded sequence included in ATCC Deposit No: XXXXX;
(m) a polypeptide consisting of amino acids 2 to 829 of SEQ ID NO:4, wherein said amino acids 2 to 316 consisting of a polypeptide of SEQ ID NO:4 minus the start methionine;
(n) a polypeptide consisting of amino acids 1 to 829 of SEQ ID NO:4;
(o) a polypeptide fragment of SEQ ID NO:6 or the encoded sequence included in ATCC Deposit No: XXXXX;
(p) a polypeptide fragment of SEQ ID NO:6 or the encoded sequence included in ATCC Deposit No: XXXXX, having coupling activity;
(q) a polypeptide domain of SEQ ID NO:6 or the encoded sequence included in ATCC Deposit No: XXXXX;
(r) a polypeptide epitope of SEQ ID NO:6 or the encoded sequence included in ATCC Deposit No: XXXXX;
(s) a full length protein of SEQ ID NO:6 or the encoded sequence included in ATCC Deposit No: XXXXX;
(t) a polypeptide consisting of amino acids 2 to 894 of SEQ ID NO:6, wherein said amino acids 2 to 316 consisting of a polypeptide of SEQ ID NO:6 minus the start methionine;
(u) a polypeptide consisting of amino acids 1 to 894 of SEQ ID NO:6;
(v) a polypeptide fragment of SEQ ID NO:8 or the encoded sequence included in ATCC Deposit No: PTA-4175;
(w) a polypeptide fragment of SEQ ID NO:8 or the encoded sequence included in ATCC Deposit No: PTA-4175, having coupling activity;
(x) a polypeptide domain of SEQ ID NO:8 or the encoded sequence included in ATCC Deposit No: PTA-4175;
(y) a polypeptide epitope of SEQ ID NO:8 or the encoded sequence included in ATCC Deposit No: PTA-4175;
(z) a full length protein of SEQ ID NO:8 or the encoded sequence included in ATCC Deposit No: PTA-4175;
(aa) a polypeptide consisting of amino acids 2 to 400 of SEQ ID NO:8, wherein said amino acids 2 to 316 consisting of a polypeptide of SEQ ID NO:8 minus the start methionine;
(bb) a polypeptide consisting of amino acids 1 to 400 of SEQ ID NO:8;
(cc) a polypeptide fragment of SEQ ID NO:10 or the encoded sequence included in ATCC Deposit No: XXXXX;
(dd) a polypeptide fragment of SEQ ID NO:10 or the encoded sequence included in ATCC Deposit No: XXXXX, having coupling activity;
(ec) a polypeptide domain of SEQ ID NO:10 or the encoded sequence included in ATCC Deposit No: XXXXX;
(ff) a polypeptide epitope of SEQ ID NO:10 or the encoded sequence included in ATCC Deposit No: XXXXX;
(gg) a full length protein of SEQ ID NO:10 or the encoded sequence included in ATCC Deposit No: XXXXX;
(hh) a polypeptide consisting of amino acids 2 to 549 of SEQ ID NO:10, wherein said amino acids 2 to 316 consisting of a polypeptide of SEQ ID NO:10 minus the start methionine;
(ii) a polypeptide consisting of amino acids 1 to 549 of SEQ ID NO:10;
(jj) a polypeptide fragment of SEQ ID NO:12 or the encoded sequence included in ATCC Deposit No: XXXXX;
(kk) a polypeptide fragment of SEQ ID NO:12 or the encoded sequence included in ATCC Deposit No: XXXXX, having coupling activity;
(ll) a polypeptide domain of SEQ ID NO:12 or the encoded sequence included in ATCC Deposit No: XXXXX;
(mm) a polypeptide epitope of SEQ ID NO:12 or the encoded sequence included in ATCC Deposit No: XXXXX;
(nn) a full length protein of SEQ ID NO:12 or the encoded sequence included in ATCC Deposit No: XXXXX;
(oo) a polypeptide consisting of amino acids 2 to 455 of SEQ ID NO:12, wherein said amino acids 2 to 316 consisting of a polypeptide of SEQ ID NO:12 minus the start methionine;
(pp) a polypeptide consisting of amino acids 1 to 455 of SEQ ID NO:12;
(qq) a polypeptide fragment of SEQ ID NO:14 or the encoded sequence included in ATCC Deposit No: XXXXX;
(rr) a polypeptide fragment of SEQ ID NO:14 or the encoded sequence included in ATCC Deposit No: XXXXX, having coupling activity;
(ss) a polypeptide domain of SEQ ID NO:14 or the encoded sequence included in ATCC Deposit No: XXXXX;
(tt) a polypeptide epitope of SEQ ID NO:14 or the encoded sequence included in ATCC Deposit No: XXXXX;
(uu) a full length protein of SEQ ID NO:14 or the encoded sequence included in ATCC Deposit No: XXXXX;
(vv) a polypeptide consisting of amino acids 2 to 508 of SEQ ID NO:14, wherein said amino acids 2 to 316 consisting of a polypeptide of SEQ ID NO:14 minus the start methionine;
(ww) a polypeptide consisting of amino acids 1 to 508 of SEQ ID NO:14;
(xx) a polypeptide fragment of SEQ ID NO:16; or the encoded sequence included in ATCC Deposit No: XXXXX;
(yy) a polypeptide fragment of SEQ ID NO:16 or the encoded sequence included in ATCC Deposit No: XXXXX, having coupling activity;
(zz) a polypeptide domain of SEQ ID NO:16 or the encoded sequence included in ATCC Deposit No: XXXXX;
(aaa) a polypeptide epitope of SEQ ID NO:16 or the encoded sequence included in ATCC Deposit No: XXXXX;
(bbb) a full length protein of SEQ ID NO:16 or the encoded sequence included in ATCC Deposit No: XXXX;
(ccc) a polypeptide consisting of amino acids 2 to 398 of SEQ ID NO:16, wherein said amino acids 2 to 316 consisting of a polypeptide of SEQ ID NO:16 minus the start methionine;
(ddd) a polypeptide consisting of amino acids 1 to 398 of SEQ ID NO:16;
(eee) a polypeptide fragment of SEQ ID NO:18 or the encoded sequence included in ATCC Deposit No: XXXXX;
(fff) a polypeptide fragment of SEQ ID NO:18 or the encoded sequence included in ATCC Deposit No: XXXXX, having coupling activity;
(ggg) a polypeptide domain of SEQ ID NO:18 or the encoded sequence included in ATCC Deposit No: XXXXX;
(hhh) a polypeptide epitope of SEQ ID NO:18 or the encoded sequence included in ATCC Deposit No: XXXXX;
(iii) a full length protein of SEQ ID NO:18 or the encoded sequence included in ATCC Deposit No: XXXXX;
(jjj) a polypeptide consisting of amino acids 2 to 389 of SEQ ID NO:18, wherein said amino acids 2 to 316 consisting of a polypeptide of SEQ ID NO:18 minus the start methionine;
(kkk) a polypeptide consisting of amino acids 1 to 389 of SEQ ID NO:18;
(lll) a polypeptide fragment of SEQ ID NO:20 or the encoded sequence included in ATCC Deposit No: XXXXX;
(mmm) a polypeptide fragment of SEQ ID NO:20 or the encoded sequence included in ATCC Deposit No: XXXXX, having coupling activity;
(nnn) a polypeptide domain of SEQ ID NO:20 or the encoded sequence. included in ATCC Deposit No: XXXXX;
(ppp) a full length protein of SEQ ID NO:20 or the encoded sequence included in ATCC Deposit No: XXXXX;
(qqq) a polypeptide consisting of amino acids 2 to 926 of SEQ ID NO:20, wherein said amino acids 2 to 316 consisting of a polypeptide of SEQ ID NO:20 minus the start methionine; and
(rrr) a polypeptide consisting of amino acids 1 to 926 of SEQ ID NO:20.

19. The method of diagnosing a pathological condition of claim 13 wherein the condition is a member of the group consisting of: a disorder related to aberrant G-protein coupled receptor activity; a disorder related to aberrant signal transduction; a reproductive disorder; a male reproductive disorder; a testicular disorder; a vas deferens disorder; spermatogenesis; infertility; Klinefelter's syndrome; XX male; epididymitis; genital warts; germinal cell aplasia; cryptorchidism; varicocele; immotile cilia syndrome; viral orchitis; sperm transport disorders; testicular cancer; choriocarcinoma; nonseminoma; seminona; testicular germ cell tumors; male hormone disorders; premature puberty; incomplete puberty; Kallman syndrome; Cushing's syndrome; an immune disorder; a proliferative immune disorder; leukemia; arthritis, asthma, immunodeficiency diseases such as AIDS, rheumatoid arthritis, granulomatous disease, inflammatory bowel disease, sepsis, acne, neutropenia, neutrophilia, psoriasis, hypersensitivities, such as T-cell mediated cytotoxicity; immune reactions to transplanted organs and tissues, such as host-versus-graft and graft-versus-host diseases, or autoimmunity disorders, such as autoimmune infertility, lense tissue injury, demyelination, systemic lupus erythematosis, drug induced hemolytic anemia, rheumatoid arthritis, Sjogren's disease, scleroderma; T-cell maturation disorders; B-cell maturation disorders; vascular disorders; stroke; ischemia; myocardial infarction; atherosclerosis; embolisms; thrombosis; gastrointestinal disorders; irritable bowel syndrome; ulcers; pulmonary disorders; brain disorders; endocrine disorders; ovarian cancer or related proliferative condition of the ovary, stomach cancer or related proliferative condition of the stomach, colon cancer or related proliferative condition of the colon, and kidney cancer or related proliferative condition of the kidney.

20. The method for preventing, treating, or ameliorating a medical condition of claim 11, wherein the medical condition is selected from the group consisting of: a disorder related to aberrant G-protein coupled receptor activity; a disorder related to aberrant signal transduction; a reproductive disorder; a male reproductive disorder; a testicular disorder; a vas deferens disorder; spermatogenesis; infertility; Klinefelter's syndrome; XX male; epididymitis; genital warts; germinal cell aplasia; cryptorchidism; varicocele; immotile cilia syndrome; viral orchitis; sperm transport disorders; testicular cancer; choriocarcinoma; nonseminoma; seminona; testicular germ cell tumors; male hormone disorders; premature puberty; incomplete puberty; Kallman syndrome; Cushing's syndrome; an immune disorder; a proliferative immune disorder; leukemia; arthritis, asthma, immunodeficiency diseases such as AIDS, rheumatoid arthritis, granulomatous disease, inflammatory bowel disease, sepsis, acne, neutropenia, neutrophilia, psoriasis, hypersensitivities, such as T-cell mediated cytotoxicity; immune reactions to transplanted organs and tissues, such as host-versus-graft and graft-versus-host diseases, or autoimmunity disorders, such as autoimmune infertility, lense tissue injury, demyelination, systemic lupus erythematosis, drug induced hemolytic anemia, rheumatoid arthritis, Sjogren's disease, scleroderma; T-cell maturation disorders; B-cell maturation disorders; vascular disorders; stroke; ischemia; myocardial infarction; atherosclerosis; embolisms; thrombosis; gastrointestinal disorders; irritable bowel syndrome; ulcers; pulmonary disorders; brain disorders; endocrine disorders; ovarian cancer or related proliferative condition of the ovary, stomach cancer or related proliferative condition of the stomach, colon cancer or related proliferative condition of the colon, and kidney cancer or related proliferative condition of the kidney.

The application's sequence listing, which the Patent Office published only in electronic form, follows.

SEQUENCE LISTING (471 sequences)

SEQ ID NO: 1 - DNA, 2592 bp, Homo sapiens
  CDS (1)..(2589)
atgctgggccctgctgtcctgggcctcagcctctgggctctcctgcaccctgggacgggggccccattgtgcctgtcacagcaacttaggatgaagggggactacgtgctgggggggctgttccccctgggcgaggccgaggaggctggcctccgcagccggacacggcccagcagccctgtgtgcaccaggttctcctcaaacggcctgctctgggcactggccatgaaaatggccgtggaggagatcaacaacaagtcggatctgctgcccgggctgcgcctgggctacgacctctttgatacgtgctcggagcctgtggtggccatgaagcccagcctcatgttcctggccaaggcaggcagccgcgacatcgccgcctactgcaactacacgcagtaccagccccgtgtgctggctgtcatcgggccccactcgtcagagctcgccatggtcaccggcaagttcttcagcttcttcctcatgccccaggtcagctacggtgctagcatggagctgctgagcgcccgggagaccttcccctccttcttccgcaccgtgcccagcgaccgtgtgcagctgacggccgccgcggagctgctgcaggagttcggctggaactgggtggccgccctgggcagcgacgacgagtacggccggcagggcctgagcatcttctcggccctggccgcggcacgcggcatctgcatcgcgcacgagggcctggtgccgctgccccgtgccgatgactcgcggctggggaaggtgcaggacgtcctgcaccaggtgaaccagagcagcgtgcaggtggtgctgctgttcgcctccgtgcacgccgcccacgccctcttcaactacagcatcagcagcaggctctcgcccaaggtgtgggtggccagcgaggcctggctgacctctgacctggtcatggggctgcccggcatggcccagatgggcacggtgcttggcttcctccagaggggtgcccagctgcacgagttcccccagtacgtgaagacgcacctggccctggccaccgacccggccttctgctctgccctgggcgagagggagcagggtctggaggaggacgtggtgggccagcgctgcccgcagtgtgactgcatcacgctgcagaacgtgagcgcagggctaaatcaccaccagacgttctctgtctacgcagctgtgtatagcgtggcccaggccctgcacaacactcttcagtgcaacgcctcaggctgccccgcgcaggaccccgtgaagccctggcagctcctggagaacatgtacaacctgaccttccacgtgggcgggctgccgctgcggttcgacagcagcggaaacgtggacatggagtacgacctgaagctgtgggtgtggcagggctcagtgcccaggctccacgacgtgggcaggttcaacggcagcctcaggacagagcgcctgaagatccgctggcacacgtctgacaaccagccgagcagagccagaccccaggcctgtgcgcagaagcccgtgtcccggtgctcgcggcagtgccaggagggccaggtgcgccgggtcaaggggttccactcctgctgctacgactgtgtggactgcgaggcgggcagctaccggcaaaacccagacgacatcgcctgcaccttttgtggccaggatgagtggtccccggagcgaagcacacgctgcttccgccgcaggtctcggttcctggcatggggcgagccggctgtgctgctgctgctcctgctgctgagcctggcgctgggccttgtgctggctgctttggggctgttcgttcaccatcgggacagcccactggttcaggcctcgggggggcccctggcctgctttggcctggtgtgcctgggcctggtctgcctcagcgtcctcctgttccctggccagcccagccctgcccgatgcctggcccagcagcccttgtcccacctcccgctcacgggctgcctgagcacactcttcctgcaggcggccgagatcttcgtggagtcagaactgcctctgagctgggcagaccggctgagtggctgcctgcgggggccctgggcctggctggtggtgctgctggccatgctggtggaggtcgcactgtgcacctggtacctggtggccttcccgccggaggtggtgacggactggcacatgctgcccacggaggcgctggtgcactgccgcacacgctcctgggtcagcttcggcctagcgcacgccaccaatgccacgctggcctttctctgcttcctgggcactttcctggtgcggagccagccgggccgctacaaccgtgcccgtggcctcacctttgccatgctggcctacttcatcacctgggtctcctttgtgcccctcctggccaatgtgcaggtggtcctcaggcccgccgtgcagatgggcgccctcctgctctgtgtcctgggcatcctggctgccttccacctgcccaggtgttacctgctcatgcggcagccagggctcaacacccccgagttcttcctgggagggggccctggggatgcccaaggccagaatgacgggaacacaggaaatcaggggaaacatgagtga

SEQ ID NO: 2 - protein, 863 aa, Homo sapiens
MLGPAVLGLSLWALLHPGTGAPLCLSQQLRMKGDYVLGGLFPLGEAEEAGLRSRTRPSSPVCTRFSSNGLLWALAMKMAVEEINNKSDLLPGLRLGYDLFDTCSEPVVAMKPSLMFLAKAGSRDIAAYCNYTQYQPRVLAVIGPHSSELAMVTGKFFSFFLMPQVSYGASMELLSARETFPSFFRTVPSDRVQLTAAAELLQEFGWNWVAALGSDDEYGRQGLSIFSALAAARGICIAHEGLVPLPRADDSRLGKVQDVLHQVNQSSVQVVLLFASVHAAHALFNYSISSRLSPKVWVASEAWLTSDLVMGLPGMAQMGTVLGFLQRGAQLHEFPQYVKTHLALATDPAFCSALGEREQGLEEDVVGQRCPQCDCITLQNVSAGLNHHQTFSVYAAVYSVAQALHNTLQCNASGCPAQDPVKPWQLLENMYNLTFHVGGLPLRFDSSGNVDMEYDLKLWVWQGSVPRLHDVGRFNGSLRTERLKIRWHTSDNQPSRARPQACAQKPVSRCSRQCQEGQVRRVKGFHSCCYDCVDCEAGSYRQNPDDIACTFCGQDEWSPERSTRCFRRRSRFLAWGEPAVLLLLLLLSLALGLVLAALGLFVHHRDSPLVQASGGPLACFGLVCLGLVCLSVLLFPGQPSPARCLAQQPLSHLPLTGCLSTLFLQAAEIFVESELPLSWADRLSGCLRGPWAWLVVLLAMLVEVALCTWYLVAFPPEVVTDWHMLPTEALVHCRTRSWVSFGLAHATNATLAFLCFLGTFLVRSQPGRYNRARGLTFAMLAYFITWVSFVPLLANVQVVLRPAVQMGALLLCVLGILAAFHLPRCYLLMRQPGLNTPEFFLGGGPGDAQGQNDGNTGNQGKHE

SEQ ID NO: 3 - DNA, 2490 bp, Homo sapiens
  CDS (1)..(2487)
atgctgggccctgctgtcctgggcctcagcctctgggctctcctgcaccctgggacgggggccccattgtgcctgtcacagcaacttaggatgaagggggactacgtgctgggggggctgttccccctgggcgaggccgaggaggctggcctccgcagccggacacggcccagcagccctgtgtgcaccaggttctcctcaaacggcctgctctgggcactggccatgaaaatggccgtggaggagatcaacaacaagtcggatctgctgcccgggctgcgcctgggctacgacctctttgatacgtgctcggagcctgtggtggccatgaagcccagcctcatgttcctggccaaggcaggcagccgcgacatcgccgcctactgcaactacacgcagtaccagccccgtgtgctggctgtcatcgggccccactcgtcagagctcgccatggtcaccggcaagttcttcagcttcttcctcatgccccaggtcagctacggtgctagcatggagctgctgagcgcccgggagaccttcccctccttcttccgcaccgtgcccagcgaccgtgtgcagctgacggccgccgcggagctgctgcaggagttcggctggaactgggtggccgccctgggcagcgacgacgagtacggccggcagggcctgagcatcttctcggccctggccgcggcacgcggcatctgcatcgcgcacgagggcctggtgccgctgccccgtgccgatgactcgcggctggggaaggtgcaggacgtcctgcaccaggtgaaccagagcagcgtgcaggtggtgctgctgttcgcctccgtgcacgccgcccacgccctcttcaactacagcatcagcagcaggctctcgcccaaggtgtgggtggccagcgaggcctggctgacctctgacctggtcatggggctgcccggcatggcccagatgggcacggtgcttggcttcctccagaggggtgcccagctgcacgagttcccccagtacgtgaagacgcacctggccctggccaccgacccggccttctgctctgccctgggcgagagggagcagggtctggaggaggacgtggtgggccagcgctgcccgcagtgtgactgcatcacgctgcagaacgtgagcgcagggctaaatcaccaccagacgttctctgtctacgcagctgtgtatagcgtggcccaggccctgcacaacactcttcagtgcaacgcctcaggctgccccgcgcaggaccccgtgaagccctggcagctcctggagaacatgtacaacctgaccttccacgtgggcgggctgccgctgcggttcgacagcagcggaaacgtggacatggagtacgacctgaagctgtgggtgtggcagggctcagtgcccaggctccacgacgtgggcaggttcaacggcagcctcaggacagagcgcctgaagatccgctggcacacgtctgacaaccaggtgcccgtgtcccggtgctcgcggcagtgccaggagggccaggtgcgccgggtcaaggggttccactcctgctgctacgactgtgtggactgcgaggcgggcagctaccggcaaaacccagacgacatcgcctgcaccttttgtggccaggatgagtggtccccggagcgaagcacacgctgcttccgccgcaggtctcggttcctggcatggggcgagccggctgtgctgctgctgctcctgctgctgagcctggcgctgggccttgtgctggctgctttggggctgttcgttcaccatcgggacagcccactggttcaggcctcgggggggcccctggcctgctttggcctggtgtgcctgggcctggtctgcctcagcgtcctcctgttccctggccagcccagccctgcccgatgcctggcccagcagcccttgtcccacctcccgctcacgggctgcctgagcacactcttcctgcgggggccctgggcctggctggtggtgctgctggccatgctggtggaggtcgcactgtgcacctggtacctggtggccttcccgccggaggtggtgacggactggcacatgctgcccacggaggcgctggtgcactgccgcacacgctcctgggtcagcttcggcctagcgcacgccaccaatgccacgctggcctttctctgcttcctgggcactttcctggtgcggagccagccgggccgctacaaccgtgcccgtggcctcacctttgccatgctggcctacttcatcacctgggtctcctttgtgcccctcctggccaatgtgcaggtggtcctcaggcccgccgtgcagatgggcgccctcctgctctgtgtcctgggcatcctggctgccttccacctgcccaggtgttacctgctcatgcggcagccagggctcaacacccccgagttcttcctgggagggggccctggggatgcccaaggccagaatgacgggaacacaggaaatcaggggaaacatgagtga

SEQ ID NO: 4 - protein, 829 aa, Homo sapiens
MLGPAVLGLSLWALLHPGTGAPLCLSQQLRMKGDYVLGGLFPLGEAEEAGLRSRTRPSSPVCTRFSSNGLLWALAMKMAVEEINNKSDLLPGLRLGYDLFDTCSEPVVAMKPSLMFLAKAGSRDIAAYCNYTQYQPRVLAVIGPHSSELAMVTGKFFSFFLMPQVSYGASMELLSARETFPSFFRTVPSDRVQLTAAAELLQEFGWNWVAALGSDDEYGRQGLSIFSALAAARGICIAHEGLVPLPRADDSRLGKVQDVLHQVNQSSVQVVLLFASVHAAHALFNYSISSRLSPKVWVASEAWLTSDLVMGLPGMAQMGTVLGFLQRGAQLHEFPQYVKTHLALATDPAFCSALGEREQGLEEDVVGQRCPQCDCITLQNVSAGLNHHQTFSVYAAVYSVAQALHNTLQCNASGCPAQDPVKPWQLLENMYNLTFHVGGLPLRFDSSGNVDMEYDLKLWVWQGSVPRLHDVGRFNGSLRTERLKIRWHTSDNQVPVSRCSRQCQEGQVRRVKGFHSCCYDCVDCEAGSYRQNPDDIACTFCGQDEWSPERSTRCFRRRSRFLAWGEPAVLLLLLLLSLALGLVLAALGLFVHHRDSPLVQASGGPLACFGLVCLGLVCLSVLLFPGQPSPARCLAQQPLSHLPLTGCLSTLFLRGPWAWLVVLLAMLVEVALCTWYLVAFPPEVVTDWHMLPTEALVHCRTRSWVSFGLAHATNATLAFLCFLGTFLVRSQPGRYNRARGLTFAMLAYFITWVSFVPLLANVQVVLRPAVQMGALLLCVLGILAAFHLPRCYLLMRQPGLNTPEFFLGGGPGDAQGQNDGNTGNQGKHE

SEQ ID NO: 5 - DNA, 2685 bp, Homo sapiens
  CDS (1)..(2682)
atgctgggccctgctgtcctgggcctcagcctctgggctctcctgcaccctgggacgggggccccattgtgcctgtcacagcaacttaggatgaagggggactacgtgctgggggggctgttccccctgggcgaggccgaggaggctggcctccgcagccggacacggcccagcagccctgtgtgcaccaggttctcctcaaacggcctgctctgggcactggccatgaaaatggccgtggaggagatcaacaacaagtcggatctgctgcccgggctgcgcctgggctacgacctctttgatacgtgctcggagcctgtggtggccatgaagcccagcctcatgttcctggccaaggcaggcagccgcgacatcgccgcctactgcaactacacgcagtaccagccccgtgtgctggctgtcatcgggccccactcgtcagagctcgccatggtcaccggcaagttcttcagcttcttcctcatgccccaggtcagctacggtgctagcatggagctgctgagcgcccgggagaccttcccctccttcttccgcaccgtgcccagcgaccgtgtgcagctgacggccgccgcggagctgctgcaggagttcggctggaactgggtggccgccctgggcagcgacgacgagtacggccggcagggcctgagcatcttctcggccctggccgcggcacgcggcatctgcatcgcgcacgagggcctggtgccgctgccccgtgccgatgactcgcggctggggaaggtgcaggacgtcctgcaccaggtgaaccagagcagcgtgcaggtggtgctgctgttcgcctccgtgcacgccgcccacgccctcttcaactacagcatcagcagcaggctctcgcccaaggtgtgggtggccagcgaggcctggctgacctctgacctggtcatggggctgcccggcatggcccagatgggcacggtgcttggcttcctccagaggggtgcccagctgcacgagttcccccagtacgtgaagacgcacctggccctggccaccgacccggccttctgctctgccctgggcgagagggagcagggtctggaggaggacgtggtgggccagcgctgcccgcagtgtgactgcatcacgctgcagaacgtgagcgcagggctaaatcaccaccagacgttctctgtctacgcagctgtgtatagcgtggcccaggccctgcacaacactcttcagtgcaacgcctcaggctgccccgcgcaggaccccgtgaagccctggcagctcctggagaacatgtacaacctgaccttccacgtgggcgggctgccgctgcggttcgacagcagcggaaacgtggacatggagtacgacctgaagctgtgggtgtggcagggctcagtgcccaggctccacgacgtgggcaggttcaacggcagcctcaggacagagcgcctgaagatccgctggcacacgtctgacaaccaggtgcccgtgtcccggtgctcgcggcagtgccaggagggccaggtgcgccgggtcaaggggttccactcctgctgctacgactgtgtggactgcgaggcgggcagctaccggcaaaacccaggtgagccgccttcccggcaggcgggggtgggaacgcagcaggggagggtcctgccaagtcctgactctgagaccagagcccacagggtacaagacgaacacccagcgcccttctcctctctcacagacgacatcgcctgcaccttttgtggccaggatgagtggtccccggagcgaagcacacgctgcttccgccgcaggtctcggttcctggcatggggcgagccggctgtgctgctgctgctcctgctgctgagcctggcgctgggccttgtgctggctgctttggggctgttcgttcaccatcgggacagcccactggttcaggcctcgggggggcccctggcctgctttggcctggtgtgcctgggcctggtctgcctcagcgtcctcctgttccctggccagcccagccctgcccgatgcctggcccagcagcccttgtcccacctcccgctcacgggctgcctgagcacactcttcctgcaggcggccgagatcttcgtggagtcagaactgcctctgagctgggcagaccggctgagtggctgcctgcgggggccctgggcctggctggtggtgctgctggccatgctggtggaggtcgcactgtgcacctggtacctggtggccttcccgccggaggtggtgacggactggcacatgctgcccacggaggcgctggtgcactgccgcacacgctcctgggtcagcttcggcctagcgcacgccaccaatgccacgctggcctttctctgcttcctgggcactttcctggtgcggagccagccgggccgctacaaccgtgcccgtggcctcacctttgccatgctggcctacttcatcacctgggtctcctttgtgcccctcctggccaatgtgcaggtggtcctcaggcccgccgtgcagatgggcgccctcctgctctgtgtcctgggcatcctggctgccttccacctgcccaggtgttacctgctcatgcggcagccagggctcaacacccccgagttcttcctgggagggggccctggggatgcccaaggccagaatgacgggaacacaggaaatcaggggaaacatgagtga

SEQ ID NO: 6 - protein, 894 aa, Homo sapiens
MLGPAVLGLSLWALLHPGTGAPLCLSQQLRMKGDYVLGGLFPLGEAEEAGLRSRTRPSSPVCTRFSSNGLLWALAMKMAVEEINNKSDLLPGLRLGYDLFDTCSEPVVAMKPSLMFLAKAGSRDIAAYCNYTQYQPRVLAVIGPHSSELAMVTGKFFSFFLMPQVSYGASMELLSARETFPSFFRTVPSDRVQLTAAAELLQEFGWNWVAALGSDDEYGRQGLSIFSALAAARGICIAHEGLVPLPRADDSRLGKVQDVLHQVNQSSVQVVLLFASVHAAHALFNYSISSRLSPKVWVASEAWLTSDLVMGLPGMAQMGTVLGFLQRGAQLHEFPQYVKTHLALATDPAFCSALGEREQGLEEDVVGQRCPQCDCITLQNVSAGLNHHQTFSVYAAVYSVAQALHNTLQCNASGCPAQDPVKPWQLLENMYNLTFHVGGLPLRFDSSGNVDMEYDLKLWVWQGSVPRLHDVGRFNGSLRTERLKIRWHTSDNQVPVSRCSRQCQEGQVRRVKGFHSCCYDCVDCEAGSYRQNPGEPPSRQAGVGTQQGRVLPSPDSETRAHRVQDEHPAPFSSLTDDIACTFCGQDEWSPERSTRCFRRRSRFLAWGEPAVLLLLLLLSLALGLVLAALGLFVHHRDSPLVQASGGPLACFGLVCLGLVCLSVLLFPGQPSPARCLAQQPLSHLPLTGCLSTLFLQAAEIFVESELPLSWADRLSGCLRGPWAWLVVLLAMLVEVALCTWYLVAFPPEVVTDWHMLPTEALVHCRTRSWVSFGLAHATNATLAFLCFLGTFLVRSQPGRYNRARGLTFAMLAYFITWVSFVPLLANVQVVLRPAVQMGALLLCVLGILAAFHLPRCYLLMRQPGLNTPEFFLGGGPGDAQGQNDGNTGNQGKHE

SEQ ID NO: 7 - DNA, 1203 bp, Homo sapiens
  CDS (1)..(1200)
atggccccttctgcagcctggcctccccgatctcccctttcacagggcccccggctcggcctgggagatggcagcggcgtgttgaacaatcgcctggtgggtttgagtgtgggacaaatgcatgtcaccaagctggctgagcctctggagatcgtcttctctcaccagcgaccgccccctaacatgaccctcacctgtgtattctgggatgtgactaaagggaccactggagactggtcttctgagggctgctccacggaggtcagacctgaggggaccgtgtgctgctgtgaccacctgacctttttcgccctgctcctgagacccaccttggaccagtccacggtgcatatcctcacacgcatctcccaggcgggctgtggggtctccatgatcttcctggccttcaccattattctttatgcctttctgaggctttcccgggagaggttcaagtcagaagatgccccaaagatccacgtggccctgggtggcagcctgttcctcctgaatctggccttcttggtcaatgtggggagtggctcaaaggggtctgatgctgcctgctgggcccggggggctgtcttccactacttcctgctctgtgccttcacctggatgggccttgaagccttccacctctacctgctcgctgtcagggtcttcaacacctacttcgggcactacttcctgaagctgagcctggtgggctggggcctgcccgccctgatggtcatcggcactgggagtgccaacagctacggcctctacaccatccgtgatagggagaaccgcacctctctggagctatgctggttccgtgaagggacaaccatgtacgccctctatatcaccgtccacggctacttcctcatcaccttcctctttggcatggtggtcctggccctggtggtctggaagatcttcaccctgtcccgtgctacagcggtcaaggagcgggggaagaaccggaagaaggtgctcaccctgctgggcctctcgagcctggtgggtgtgacatgggggttggccatcttcaccccgttgggcctctccaccgtctacatctttgcacttttcaactccttgcaaggtgtcttcatctgctgctggttcaccatcctttacctcccaagtcagagcaccacagtctcctcttctactgcaagattggaccaggcccactccccatctcaagaatag

SEQ ID NO: 8 - protein, 400 aa, Homo sapiens
MAPSAAWPPRSPLSQGPRLGLGDGSGVLNNRLVGLSVGQMHVTKLAEPLEIVFSHQRPPPNMTLTCVFWDVTKGTTGDWSSEGCSTEVRPEGTVCCCDHLTFFALLLRPTLDQSTVHILTRISQAGCGVSMIFLAFTIILYAFLRLSRERFKSEDAPKIHVALGGSLFLLNLAFLVNVGSGSKGSDAACWARGAVFHYFLLCAFTWMGLEAFHLYLLAVRVFNTYFGHYFLKLSLVGWGLPALMVIGTGSANSYGLYTIRDRENRTSLELCWFREGTTMYALYITVHGYFLITFLFGMVVLALVVWKIFTLSRATAVKERGKNRKKVLTLLGLSSLVGVTWGLAIFTPLGLSTVYIFALFNSLQGVFICCWFTILYLPSQSTTVSSSTARLDQAHSPSQE

SEQ ID NO: 9 - DNA, 1650 bp, Homo sapiens
  CDS (1)..(1647)
atggcgacgcccaggggcctgggggccctgctcctgctcctcctgctcccgacctcaggtcaggaaaagcccaccgaagggccaagaaacacctgcctggggagcaacaacatgtacgacatcttcaacttgaatgacaaggctttgtgcttcaccaagtgcaggcagtcgggcagcgactcctgcaatgtggaaaacttgcagagatactggctaaactacgaggcccatctgatgaaggaaggtttgacgcagaaggtgaacacgcctttcctgaaggctttggtccagaacctcagcaccaacactgcagaagacttctatttctctctggagccctctcaggttccgaggcaggtgatgaaggacgaggacaagccccctgacagagtgcgacttcccaagagcctttttcgatccctgccaggcaacaggtctgtggtccgcttggccgtcaccattctggacattggtccagggactctcttcaagggcccccggctcggcctgggagatggcagcggcgtgttgaacaatcgcctggtgggtttgagtgtgggacaaatgcatgtcaccaagctggctgagcctctggagatcgtcttctctcaccagcgaccgccccctaacatgaccctcacctgtgtattctgggatgtgactaaagggaccactggagactggtcttctgagggctgctccacggaggtcagacctgaggggaccgtgtgctgctgtgaccacctgacctttttcgccctgctcctgagacccaccttggaccagtccacggtgcatatcctcacacgcatctcccaggcgggctgtggggtctccatgatcttcctggccttcaccattattctttatgcctttctgaggctttcccgggagaggttcaagtcagaagatgccccaaagatccacgtggccctgggtggcagcctgttcctcctgaatctggccttcttggtcaatgtggggagtggctcaaaggggtctgatgctgcctgctgggcccggggggctgtcttccactacttcctgctctgtgccttcacctggatgggccttgaagccttccacctctacctgctcgctgtcagggtcttcaacacctacttcgggcactacttcctgaagctgagcctggtgggctggggcctgcccgccctgatggtcatcggcactgggagtgccaacagctacggcctctacaccatccgtgatagggagaaccgcacctctctggagctatgctggttccgtgaagggacaaccatgtacgccctctatatcaccgtccacggctacttcctcatcaccttcctctttggcatggtggtcctggccctggtggtctggaagatcttcaccctgtcccgtgctacagcggtcaaggagcgggggaagaaccggaagaaggtgctcaccctgctgggcctctcgagcctggtgggtgtgacatgggggttggccatcttcaccccgttgggcctctccaccgtctacatctttgcacttttcaactccttgcaaggtgtcttcatctgctgctggttcaccatcctttacctcccaagtcagagcaccacagtctcctcctctactgcaagattggaccaggcccactccgcatctcaagaatag

SEQ ID NO: 10 - protein, 549 aa, Homo sapiens
MATPRGLGALLLLLLLPTSGQEKPTEGPRNTCLGSNNMYDIFNLNDKALCFTKCRQSGSDSCNVENLQRYWLNYEAHLMKEGLTQKVNTPFLKALVQNLSTNTAEDFYFSLEPSQVPRQVMKDEDKPPDRVRLPKSLFRSLPGNRSVVRLAVTILDIGPGTLFKGPRLGLGDGSGVLNNRLVGLSVGQMHVTKLAEPLEIVFSHQRPPPNMTLTCVFWDVTKGTTGDWSSEGCSTEVRPEGTVCCCDHLTFFALLLRPTLDQSTVHILTRISQAGCGVSMIFLAFTIILYAFLRLSRERFKSEDAPKIHVALGGSLFLLNLAFLVNVGSGSKGSDAACWARGAVFHYFLLCAFTWMGLEAFHLYLLAVRVFNTYFGHYFLKLSLVGWGLPALMVIGTGSANSYGLYTIRDRENRTSLELCWFREGTTMYALYITVHGYFLITFLFGMVVLALVVWKIFTLSRATAVKERGKNRKKVLTLLGLSSLVGVTWGLAIFTPLGLSTVYIFALFNSLQGVFICCWFTILYLPSQSTTVSSSTARLDQAHSASQE

SEQ ID NO: 11 - DNA, 1368 bp, Homo sapiens
  CDS (1)..(1365)
atggcgacgcccaggggcctgggggccctgctcctgctcctcctgctcccgacctcaggtcaggaaaagcccaccgaagggccaagaaacacctgcctggggagcaacaacatgtacgacatcttcaacttgaatgacaaggctttgtgcttcaccaagtgcaggcagtcgggcagcgactcctgcaatgtggaaaacttgcagagatactggctaaactacgaggcccatctgatgaaggaaggtttgacgcagaaggtgaacacgcctttcctgaaggctttggtccagaacctcagcaccaacactgcagaagacttctatttctctctggagccctctcaggttccgaggcaggtgatgaaggacgaggacaagccccctgacagagtgcgacttcccaagagcctttttcgatccctgccaggcaacaggtctgtggtccgcttggccgtcaccattctggacattggtccagggactctcttcaagggcccccggctcggcctgggagatggcagcggcgtgttgaacaatcgcctggtgggtttgagtgtgggacaaatgcatgtcaccaagctggctgagcctctggagatcgtcttctctcaccagcgaccgccccctaacatgaccctcacctgtgtattctgggatgtgactaaagggaccactggagactggtcttctgagggctgctccacggaggtcagacctgaggggaccgtgtgctgctgtgaccacctgacctttttcgccctgctcctgagacccaccttggaccagtccacggtgcatatcctcacacgcatctcccaggcgggctgtggggtctccatgatcttcctggccttcaccattattctttatgcctttctgaggcctgcccgcctgatggtcatcggcactgggagtgccaacagctacggcctctacaccatccgtgatagggagaaccgcacctctctggagctatgctggttccgtgaagggacaaccatgtacgccctctatatcaccgtccacggctacttcctcatcaccttcctctttggcatggtggtcctggccctggtggtctggaagatcttcaccctgtcccgtgctacagcggtcaaggagcgggggaagaaccggaagaaggtgctcaccctgctgggcctctcgagcctggtgggtgtgacatgggggttggccatcttcaccccgttgggcctctccaccgtctacatctttgcacttttcaactccttgcaaggtgtcttcatctgctgctggttcaccatcctttacctcccaagtcagagcaccacagtctcctcctctactgcaagattggaccaggcccactccgcatctcaagaatag

SEQ ID NO: 12 - protein, 455 aa, Homo sapiens
MATPRGLGALLLLLLLPTSGQEKPTEGPRNTCLGSNNMYDIFNLNDKALCFTKCRQSGSDSCNVENLQRYWLNYEAHLMKEGLTQKVNTPFLKALVQNLSTNTAEDFYFSLEPSQVPRQVMKDEDKPPDRVRLPKSLFRSLPGNRSVVRLAVTILDIGPGTLFKGPRLGLGDGSGVLNNRLVGLSVGQMHVTKLAEPLEIVFSHQRPPPNMTLTCVFWDVTKGTTGDWSSEGCSTEVRPEGTVCCCDHLTFFALLLRPTLDQSTVHILTRISQAGCGVSMIFLAFTIILYAFLRPARLMVIGTGSANSYGLYTIRDRENRTSLELCWFREGTTMYALYITVHGYFLITFLFGMVVLALVVWKIFTLSRATAVKERGKNRKKVLTLLGLSSLVGVTWGLAIFTPLGLSTVYIFALFNSLQGVFICCWFTILYLPSQSTTVSSSTARLDQAHSASQE

SEQ ID NO: 13 - DNA, 1527 bp, Homo sapiens
  CDS (1)..(1524)
atgacgtccacctgcaccaacagcacgcgcgagagtaacagcagccacacgtgcatgcccctctccaaaatgcccatcagcctggcccacggcatcatccgctcaaccgtgctggttatcttcctcgccgcctctttcgtcggcaacatagtgctggcgctagtgttgcagcgcaagccgcagctgctgcaggtgaccaaccgttttatctttaacctcctcgtcaccgacctgctgcagatttcgctcgtggccccctgggtggtggccacctctgtgcctctcttctggcccctcaacagccacttctgcacggccctggttagcctcacccacctgttcgccttcgccagcgtcaacaccattgtcgtggtgtcagtggatcgctacttgtccatcatccaccctctctcctacccgtccaagatgacccagcgccgcggttacctgctcctctatggcacctggattgtggccatcctgcagagcactcctccactctacggctggggccaggctgcctttgatgagcgcaatgctctctgctccatgatctggggggccagccccagctacactattctcagcgtggtgtccttcatcgtcattccactgattgtcatgattgcctgctactccgtggtgttctgtgcagcccggaggcagcatgctctgctgtacaatgtcaagagacacagcttggaagtgcgagtcaaggactgtgtggagaatgaggatgaagagggagcagagaagaaggaggagttccaggatgagagtgagtttcgccgccagcatgaaggtgaggtcaaggccaaggagggcagaatggaagccaaggacggcagcctgaaggccaaggaaggaagcacggggaccagtgagagtagtgtagaggccaggggcagcgaggaggtcagagagagcagcacggtggccagcgacggcagcatggagggtaaggaaggcagcaccaaagttgaggagaacagcatgaaggcagacaagggtcgcacagaggtcaaccagtgcagcattgacttgggtgaagatgacatggagtttggtgaagacgacatcaatttcagtgaggatgacgtcgaggcagtgaacatcccggagagcctcccacccagtcgtcgtaacagcaacagcaaccctcctctgcccaggtgctaccagtgcaaagctgctaaagtgatcttcatcatcattttctcctatgtgctatccctggggccctactgctttttagcagtcctggccgtgtgggtggatgtcgaaacccaggtaccccagtgggtgatcaccataatcatctggcttttcttcctgcagtgctgcatccacccctatgtctatggctacatgcacaagaccattaagaaggaaatccaggacatgctgaagaagttcttctgcaaggaaaagcccccgaaagaagatagccacccagacctgcccggaacagagggtgggactgaaggcaagattgtcccttcctacgattctgctacttttccttga

SEQ ID NO: 14 - protein, 508 aa, Homo sapiens
MTSTCTNSTRESNSSHTCMPLSKMPISLAHGIIRSTVLVIFLAASFVGNIVLALVLQRKPQLLQVTNRFIFNLLVTDLLQISLVAPWVVATSVPLFWPLNSHFCTALVSLTHLFAFASVNTIVVVSVDRYLSIIHPLSYPSKMTQRRGYLLLYGTWIVAILQSTPPLYGWGQAAFDERNALCSMIWGASPSYTILSVVSFIVIPLIVMIACYSVVFCAARRQHALLYNVKRHSLEVRVKDCVENEDEEGAEKKEEFQDESEFRRQHEGEVKAKEGRMEAKDGSLKAKEGSTGTSESSVEARGSEEVRESSTVASDGSMEGKEGSTKVEENSMKADKGRTEVNQCSIDLGEDDMEFGEDDINFSEDDVEAVNIPESLPPSRRNSNSNPPLPRCYQCKAAKVIFIIIFSYVLSLGPYCFLAVLAVWVDVETQVPQWVITIIIWLFFLQCCIHPYVYGYMHKTIKKEIQDMLKKFFCKEKPPKEDSHPDLPGTEGGTEGKIVPSYDSATFP

SEQ ID NO: 15 - DNA, 1197 bp, Homo sapiens
  CDS (1)..(1194)
atgacgtccacctgcaccaacagcacgcgcgagagtaacagcagccacacgtgcatgcccctctccaaaatgcccatcagcctggcccacggcatcatccgctcaaccgtgctggttatcttcctcgccgcctctttcgtcggcaacatagtgctggcgctagtgttgcagcgcaagccgcagctgctgcaggtgaccaaccgttttatctttaacctcctcgtcaccgacctgctgcagatttcgctcgtggccccctgggtggtggccacctctgtgcctctcttctggcccctcaacagccacttctgcacggccctggttagcctcacccacctgttcgccttcgccagcgtcaacaccattgtcgtggtgtcagtggatcgctacttgtccatcatccaccctctctcctacccgtccaagatgacccagcgccgcggttacctgctcctctatggcacctggattgtggccatcctgcagagcactcctccactctacggctggggccaggctgcctttgatgagcgcaatgctctctgctccatgatctggggggccagccccagctacactattctcagcgtggtgtccttcatcgtcattccactgattgtcatgattgcctgctactccgtggtgttctgtgcagcccggaggcagcatgctctgctgtacaatgtcaagagacacagcttggaagtgcgagtcaaggactgtgtggagaatgaggatgaagagggagcagagaagaaggaggagttccaggatgagatgaacatcccggagagcctcccacccagtcgtcgtaacagcaacagcaaccctcctctgcccaggtgctaccagtgcaaagctgctaaagtgatcttcatcatcattttctcctatgtgctatccctggggccctactgctttttagcagtcctggccgtgtgggtggatgtcgaaacccaggtaccccagtgggtgatcaccataatcatctggcttttcttcctgcagtgctgcatccacccctatgtctatggctacatgcacaagaccattaagaaggaaatccaggacatgctgaagaagttcttctgcaaggaaaagcccccgaaagaagatagccacccagacctgcccggaacagagggtgggactgaaggcaagattgtcccttcctacgattctgctacttttccttga

SEQ ID NO: 16 - protein, 398 aa, Homo sapiens
MTSTCTNSTRESNSSHTCMPLSKMPISLAHGIIRSTVLVIFLAASFVGNIVLALVLQRKPQLLQVTNRFIFNLLVTDLLQISLVAPWVVATSVPLFWPLNSHFCTALVSLTHLFAFASVNTIVVVSVDRYLSIIHPLSYPSKMTQRRGYLLLYGTWIVAILQSTPPLYGWGQAAFDERNALCSMIWGASPSYTILSVVSFIVIPLIVMIACYSVVFCAARRQHALLYNVKRHSLEVRVKDCVENEDEEGAEKKEEFQDEMNIPESLPPSRRNSNSNPPLPRCYQCKAAKVIFIIIFSYVLSLGPYCFLAVLAVWVDVETQVPQWVITIIIWLFFLQCCIHPYVYGYMHKTIKKEIQDMLKKFFCKEKPPKEDSHPDLPGTEGGTEGKIVPSYDSATFP

SEQ ID NO: 17 - DNA, 1170 bp, Homo sapiens
  CDS (1)..(1167)
atgcaggaagtaaaactgaactcttacgttgtgagcggcaccatcggtttgaaggaaaaaatttccctctctgaacctgtgttcctgacttttcgccataatcagcctggtgacaagagaacaaaacatatctgtgtctactgggagggatcagagggaggccgctggtccacggagggctgctctcatgtgcacagcaacggttcttacaccaaatgcaagtgcttccatctgtccagctttgccgtcctcgtggctcttgcccccaaggaggaccctgtgctgaccgtgatcacccaggtggggctgaccatctctctgctgtgcctcttcctggccatcctcaccttcctcctgtgccggcccatccagaacaccagcacctccctccatctagagctctccctctgcctcttcctggcccacctcctgttcctgacgggcatcaacagaactgagcctgaggtgctgtgctccatcattgcagggctgctgcacttcctctacctggcttgcttcacctggatgctcctggaagggctgcacctcttcctcaccgtcaggaacctcaaggtggccaactacaccagcacgggcagattcaagaagaggttcatgtaccctgtaggctacgggatcccagctgtgattattgctgtgtcagcaatagttggaccccagaattatggaacatttactcactgttggctcaagcttgataaaggattcatctggagcttcatggggccagtagcagtcattatcttgataaacctggtgttctacttccaagttctgtggattttgagaagcaaactttcctccctcaataaagaagtttccaccattcaggacaccagagtcatgacatttaaagccatttctcagctatttatcctgggctgttcttggggccttggtttttttatggttgaagaagtagggaagacgattggatcaatcattgcatactcattcaccatcatcaacacccttcagggagtgttgctctttgtggtacactgtctccttaatcgccaggttcgaatggaatataaaaagtggtttagtgggatgcggaaaggggtagaaactgaaagcactgagatgtctcgctctactacccaaccaaacggaagaagtggggaagtcctcagaaatctttcataa

SEQ ID NO: 18 - protein, 389 aa, Homo sapiens
MQEVKLNSYVVSGTIGLKEKISLSEPVFLTFRHNQPGDKRTKHICVYWEGSEGGRWSTEGCSHVHSNGSYTKCKCFHLSSFAVLVALAPKEDPVLTVITQVGLTISLLCLFLAILTFLLCRPIQNTSTSLHLELSLCLFLAHLLFLTGINRTEPEVLCSIIAGLLHFLYLACFTWMLLEGLHLFLTVRNLKVANYTSTGRFKKRFMYPVGYGIPAVIIAVSAIVGPQNYGTFTHCWLKLDKGFIWSFMGPVAVIILINLVFYFQVLWILRSKLSSLNKEVSTIQDTRVMTFKAISQLFILGCSWGLGFFMVEEVGKTIGSIIAYSFTIINTLQGVLLFVVHCLLNRQVRMEYKKWFSGMRKGVETESTEMSRSTTQPNGRSGEVLRNLS

SEQ ID NO: 19 - DNA, 2781 bp, Homo sapiens
  CDS (1)..(2778)
atggcattcttaattatactaattacctgctttgtgattattcttgctacttcacagccttgccagacccctgatgactttgtggctgccacttctccgggacatatcataattggaggtttgtttgctattcatgaaaaaatgttgtcctcagaagactctcccagacgaccacaaatccaggagtgtgttggctttgaaatatcagtttttcttcaaactcttgccatgatacacagcattgagatgatcaacaattcaacactcttacctggagtcaaactggggtatgaaatctatgacacttgtacagaagtcacagtggcaatggcagccactctgaggtttctttctaaattcaactgctccagagaaactgtggagtttaagtgtgactattccagctacatgccaagagttaaggctgtcataggttctgggtactcagaaataactatggctgtctccaggatgttgaatttacagctcatgccacaggtaggttatgaatcaactgcagaaatcctgagtgacaaaattcgctttccttcatttttacggactgtgcccagtgacttccatcaaattaaagcaatggctcacctgattcagaaatctggttggaactggattggcatcataaccacagatgatgactatggacgattggctcttaacacttttataattcaggctgaagcaaataacgtgtgcatagccttcaaagaggttcttccagcctttctttcagataataccattgaagtcagaatcaatcggacactgaagaaaatcattttagaagcccaggttaatgtcattgtggtatttctgaggcaattccatgtttttgatctcttcaataaagccattgaaatgaatataaataagatgtggattgctagtgataattggtcaactgccaccaagattaccaccattcctaatgttaaaaagattggcaaagttgtagggtttgcctttagaagagggaatatatcctctttccattcctttcttcaaaatctgcacttgcttcccagtgacagtcacaaactcttacatgaatatgccatgcatttatctgcctgcgcatatgtcaaggacactgatttgagtcaatgcatattcaatcattctcaaaggactttggcctacaaggctaacaaggctatagaaaggaacttcgtcatgagaaatgacttcctctgggactatgctgagccaggactcattcatagtattcagcttgcagtgtttgcccttggttatgccattcgggatctgtgtcaagctcgtgactgtcagaaccccaacgcctttcaaccatgggaggtacttggtgtgctaaaaaatgtgacattcactgatggatggaattcatttcattttgatgctcacggggatttaaatactggatatgatgttgtgctctggaaggagatcaatggacacatgactgtcactaagatggcagaatatgacctacagaatgatgtcttcatcatcccagatcaggaaacaaaaaatgagttcaggaatcttaagcaaattcaatctaaatgctccaaggaatgcagtcctgggcaaatgaagaaaactacaagaagtcaacacatctgttgctatgaatgtcagaactgtcctgaaaatcattacactaatcagacagatatgcctcactgccttttatgcaacaacaaaactcactgggcccctgttaggagcactatgtgctttgaaaaggaagtggaatatctcaactggaatgactccttggccatcctactcctgattctctccctactgggaatcatatttgttctggttgttggcataatatttacaagaaacctgaacacacctgttgtgaaatcatccgggggattaagagtctgctatgtgatccttctctgtcatttcctcaattttgccagcacgagctttttcattggagaaccacaagacttcacatgtaaaaccaggcagacaatgtttggagtgagctttactctttgcatctcctgcattttgacgaagtctctgaaaattttgctagccttcagctttgatcccaaattacagaaatttctgaagtgcctctatagaccgatccttattatcttcacttgcacgggcatccaggttgtcatttgcacactctggctaatctttgcagcacctactgtagaggtgaatgtctccttgcccagagtcatcatcctggagtgtgaggagggatccatacttgcatttggcaccatgctgggctacattgccatcctggccttcatttgcttcatatttgctttcaaaggcaaatatgagaattacaatgaagccaaattcattacatttggcatgctcatttacttcatagcttggatcacattcatccctatctatgctaccacatttggcaaatatgtaccagctgtggagattattgtcatattaatatctaactatggaatcctgtattgcacattcatccccaaatgctatgttattatttgtaagcaagagattaacacaaagtctgcctttctcaagatgatctacagttattcttcccatagtgtgagcagcattgccctgagtcctgcttcactggactccatgagcggcaatgtcacaatgaccaatcccagctctagtggcaagtctgcaacctggcagaaaagcaaagatcttcaggcacaagcatttgcacacatatgcagggaaaatgccacaagtgtatctaaaactttgcctcgaaaaagaatgtcaagtatatga

SEQ ID NO: 20 - protein, 926 aa, Homo sapiens
MAFLIILITCFVIILATSQPCQTPDDFVAATSPGHIIIGGLFAIHEKMLSSEDSPRRPQIQECVGFEISVFLQTLAMIHSIEMINNSTLLPGVKLGYEIYDTCTEVTVAMAATLRFLSKFNCSRETVEFKCDYSSYMPRVKAVIGSGYSEITMAVSRMLNLQLMPQVGYESTAEILSDKIRFPSFLRTVPSDFHQIKAMAHLIQKSGWNWIGIITTDDDYGRLALNTFIIQAEANNVCIAFKEVLPAFLSDNTIEVRINRTLKKIILEAQVNVIVVFLRQFHVFDLFNKAIEMNINKMWIASDNWSTATKITTIPNVKKIGKVVGFAFRRGNISSFHSFLQNLHLLPSDSHKLLHEYAMHLSACAYVKDTDLSQCIFNHSQRTLAYKANKAIERNFVMRNDFLWDYAEPGLIHSIQLAVFALGYAIRDLCQARDCQNPNAFQPWEVLGVLKNVTFTDGWNSFHFDAHGDLNTGYDVVLWKEINGHMTVTKMAEYDLQNDVFIIPDQETKNEFRNLKQIQSKCSKECSPGQMKKTTRSQHICCYECQNCPENHYTNQTDMPHCLLCNNKTHWAPVRSTMCFEKEVEYLNWNDSLAILLLILSLLGIIFVLVVGIIFTRNLNTPVVKSSGGLRVCYVILLCHFLNFASTSFFIGEPQDFTCKTRQTMFGVSFTLCISCILTKSLKILLAFSFDPKLQKFLKCLYRPILIIFTCTGIQVVICTLWLIFAAPTVEVNVSLPRVIILECEEGSILAFGTMLGYIAILAFICFIFAFKGKYENYNEAKFITFGMLIYFIAWITFIPIYATTFGKYVPAVEIIVILISNYGILYCTFIPKCYVIICKQEINTKSAFLKMIYSYSSHSVSSIALSPASLDSMSGNVTMTNPSSSGKSATWQKSKDLQAQAFAHICRENATSVSKTLPRKRMSSI

SEQ ID NO: 21 - protein, 1085 aa, Bos taurus
MALYSCCWILLAFSTWCTSAYGPDQRAQKKGDIILGGLFPIHFGVAVKDQDLKSRPESVECIRYNFRGFRWLQAMIFAIEEINSSPALLPNMTLGYRIFDTCNTVSKALEATLSFVAQNKIDSLNLDEFCNCSEHIPSTIAVVGATGSGISTAVANLLGLFYIPQVSYASSSRLLSNKNQFKSFLRTIPNDEHQATAMADIIEYFRWNWVGTIAADDDYGRPGIEKFREEAEERDICIDFSELISQYSDEEKIQQVVEVIQNSTAKVIVVFSSGPDLEPLIKEIVRRNITGRIWLASEAWASSSLIAMPEYFHVVGGTIGFGLKAGQIPGFREFLQKVHPRKSVHNGFAKEFWEETFNCHLQEGAKGPLPVDTFLRGHEEGGARLSNSPTAFRPLCTGEENISSVETPYMDYTHLRISYNVYLAVYSIAHALQDIYTCIPGRGLFTNGSCADIKKVEAWQVLKHLRHLNFTSNMGEQVTFDECGDLAGNYSIINWHLSPEDGSIVFKEVGYYNVYAKKGERLFINDEKILWSGFSREVPFSNCSRDCLAGTRKGIIEGEPTCCFECVECPDGEYSDETDASACDKCPDDFWSNENHTSCIAKEIEFLSWTEPFGIALTLFAVLGIFLTAFVLGVFIKFRNTPIVKATNRELSYLLLFSLLCCFSSSLFFIGEPQDWTCRLRQPAFGISFVLCISCILVKTNRVLLVFEAKIPTSFHRKWWGLNLQFLLVFLCTFMQIVICAIWLNTAPPSSYRNHELEDEIIFITCHEGSLMALGFLIGYTCLLAAICFFFAFKSRKLPENFNEAKFITFSMLIFFIVWISFIPAYASTYGKFVSAVEVIAILAASFGLLACIFFNKVYIILFKPSRNTIEEVRCSTAAHAFKVAARATLRRSNVSRQRSSSLGGSTGSTPSSSISSKSNSEDPFPQQQPKRQKQPQPLALSPHNAQQPQPRPPSTPQPQPQSQQPPRCKQKVIFGSGTVTFSLSFDEPQKTAVAHRNSTHQTSLEAQKNNDALTKHQALLPLQCGETDSELTSQETGLQGPVGEDHQLEMEDPEEMSPALVVSNSRSFVISGGGSTVTENMLRS

SEQ ID NO: 22 - protein, 1078 aa, Homo sapiens
MAFYSCCWVLLALTWHTSAYGPDQRAQKKGDIILGGLFPIHFGVAAKDQDLKSRPESVECIRYNFRGFRWLQAMIFAIEEINSSPALLPNLTLGYRIFDTCNTVSKALEATLSFVAQNKIDSLNLDEFCNCSEHIPSTIAVVGATGSGVSTAVANLLGLFYIPQVSYASSSRLLSNKNQFKSFLRTIPNDEHQATAMADIIEYFRWNWVGTIAADDDYGRPGIEKFREEAEERDICIDFSELISQYSDEEEIQHVVEVIQNSTAKVIVVFSSGPDLEPLIKEIVRRNITGKIWLASEAWASSSLIAMPQYFHVVGGTIGFALKAGQIPGFREFLKKVHPRKSVHNGFAKEFWEETFNCHLQEGAKGPLPVDTFLRGHEESGDRFSNSSTAFRPLCTGDENISSVETPYIDYTHLRISYNVYLAVYSIAHALQDIYTCLPGRGLFTNGSCADIKKVEAWQVLKHLRHLNFTNNMGEQVTFDECGDLVGNYSIINWHLSPEDGSIVFKEVGYYNVYAKKGERLFINEEKILWSGFSREVPFSNCSRDCLAGTRKGIIEGEPTCCFECVECPDGEYSDETDASACNKCPDDFWSNENHTSCIAKEIEFLSWTEPFGIALTLFAVLGIFLTAFVLGVFIKFRNTPIVKATNRELSYLLLFSLLCCFSSSLFFIGEPQDWTCRLRQPAFGISFVLCISCILVKTNRVLLVFEAKIPTSFHRKWWGLNLQFLLVFLCTFMQIVICVIWLYTAPPSSYRNQELEDEIIFITCHEGSLMALGFLIGYTCLLAAICFFFAFKSRKLPENFNEAKFITFSMLIFFIVWISFIPAYASTYGKFVSAVEVIAILAASFGLLACIFFNKIYIILFKPSRNTIEEVRCSTAAHAFKVAARATLRRSNVSRKRSSSLGGSTGSTPSSSISSKSNSEDPFPQPERQKQQQPLALTQQEQQQQPLTLPQQQRSQQQPRCKQKVIFGSGTVTFSLSFDEPQKNAMAHRNSTHQNSLEAQKSSDTLTRHQPLLPLQCGETDLDLTVQETGLQGPVGGDQRPEVEDPEELSPALVVSSSQSFVISGGGSTVTENVVNS

SEQ ID NO: 23 - protein, 1079 aa, Mus musculus
MAWFGYCLALLALTWHSSAYGPDQRAQKKGDIILGGLFPIHFGVAAKDQDLKSRPESVECIRYNFRGFRWLQAMIFAIEEINSSPALLPNMTLGYRIFDTCNTVSKALEATLSFVAQNKIDSLNLDEFCNCSEHIPSTIAVVGATGSGVSTAVANLLGLFYIPQVSYASSSRLLSNKNQFKSFLRTIPNDEHQATAMADIIEYFRWNWVGTIAADDDYGRPGIEKFREEAEERDICIDFSELISQYSDEEEIQQVVEVIQNSTAKVIVVFSSGPDLEPLIKEIVRRNITGRIWLASEAWASSSLIAMPEYFHVVGGTIGFGLKAGQIPGFREFLQKVHPRKSVHNGFAKEFWEETFNCHLQDGAKGPLPVDTFVRSHEEGGNRLLNSSTAFRPLCTGDENINSVETPYMGYEHLRISYNVYLAVYSIAHALQDIYTCLPGRGLFTNGSCADIKKVEAWQVLKHLRHLNFTNNMGEQVTFDECGDLVGNYSIINWHLSPEDGSIVFKEVGYYNVYAKKGERLFINEGKILWSGFSREVPFSNCSRDCQAGTRKGIIEGEPTCCFECVECPDGEYSGETDASACDKCPDDFWSNENYTSCIAKEIEFLAWTEPFGIALTLFAVLGIFLTAFVLGVFIKFRNTPIVKATNRELSYLLLFSLLCCFSSSLFFIGEPQDWTCRLRQPAFGISFVLCISCILVKTNRVLLVFEAKIPTSFHRKWWGLNLQFLLVFLCTFMQIVICIIWLYTAPPSSYRNHELEDEIIFITCHEGSLMALGSLIGYTCLLAAICFFFAFKSRKLPENFNEAKFITFSMLIFFIVWISFIPAYASTYGKFVSAVEVIAILAASFGLLACIFFNKVYIILFKPSRNTIEEVRSSTAAHAFKVAARATLRRPNISRKRSSSLGGSTGSNPSSSISSKSNSEDRFPQPERQKQQQPLALTQQEQQQQPLTLQPQQQQQPQQPRCKQKVIFGSGTVTFSLSFDEPQKNAMAHRNSMRQNSLEAQKSNDTLNRHQALLPLQCAEADSEMTIQETGLQGPMVGDHQPEIESPDEMSPALVVSTSRSFVISGGGSSVTENILHS

SEQ ID NO: 24 - protein, 1079 aa, Rattus norvegicus
MASYSCCLALLALAWHSSAYGPDQRAQKKGDIILGGLFPIHFGVAAKDQDLKSRPESVECIRYNFRGFRWLQAMIFAIEEINSSPSLLPNMTLGYRIFDTCNTVSKALEATLSFVAQNKIDSLNLDEFCNCSEHIPSTIAVVGATGSGVSTAVANLLGLFYIPQVSYASSSRLLSNKNQYKSFLRTIPNDEHQATAMADIIEYFRWNWVGTIAADDDYGRPGIEKFREEAEERDICIDFSELISQYSDEEEIQQVVEVIQNSTAKVIVVFSSGPDLEPLIKEIVRRNITGRIWLASEAWASSSLIAMPEYFHVVGGTIGFGLKAGQIPGFREFLQKVHPRKSVHNGFAKEFWEETFNCHLQEGAKGPLPVDTFVRSHEEGGNRLLNSSTAFRPLCTGDENINSVETPYMDYEHLRISYNVYLAVYSIAHALQDIYTCLPGRGLFTNGSCADIKKVEAWQVLKHLRHLNFTNNMGEQVTFDECGDLVGNYSIINWHLSPEDGSIVFKEVGYYNVYAKKGERLFINEEKILWSGFSREVPFSNCSRDCQAGTRKGIIEGEPTCCFECVECPDGEYSGETDASACDKCPDDFWSNENHTSCIAKEIEFLAWTEPFGIALTLFAVLGIFLTAFVLGVFIKFRNTPIVKATNRELSYLLLFSLLCCFSSSLFFIGEPQDWTCRLRQPAFGISFVLCISCILVKTNRVLLVFEAKIPTSFHRKWWGLNLQFLLVFLCTFMQILICIIWLYTAPPSSYRNHELEDEIIFITCHEGSLMALGSLIGYTCLLAAICFFFAFKSRKLPENFNEAKFITFSMLIFFIVWISFIPAYASTYGKFVSAVEVIAILAASFGLLACIFFNKVYIILFKPSRNTIEEVRSSTAAHAFKVAARATLRRPNISRKRSSSLGGSTGSIPSSSISSKSNSEDRFPQPERQKQQQPLSLTQQEQQQQPLTLHPQQQQQPQQPRCKQKVIFGSGTVTFSLSFDEPQKNAMAHRNSMRQNSLEAQRSNDTLGRHQALLPLQCADADSEMTIQETGLQGPMVGDHQPEMESSDEMSPALVMSTSRSFVISGGGSSVTENVLHS

SEQ ID NO: 25 - protein, 872 aa, Homo sapiens
MGSLLALLALLPLWGAVAEGPAKKVLTLEGDLVLGGLFPVHQKGGPAEDCGPVNEHRGIQRLEAMLFALDRINRDPHLLPGVRLGAHILDSCSKDTHALEQALDFVRASLSRGADGSRHICPDGSYATHGDAPTAITGVIGGSYSDVSIQVANLLRLFQIPQISYASTSAKLSDKSRYDYFARTVPPDFFQAKAMAEILRFFNWTYVSTEASEGDYGETGIEAFELEARARNICVATSEKVGRAMSRAAFEGVVRALLQKPSARVAVLFTRSEDARELLAASQRLNASFTWVASDGWGALESVVAGSEGAAEGAITIELASYPISDFASYFQSLDPWNNSRNPWFREFWEQRFRCSFRQRDCAAHSLRAVPFEQESKIMFVVNAVYAMAHALHNMHRALCPNTTRLCDAMRPVNGRRLYKDFVLNVKFDAPFRPADTHNEVRFDRFGDGIGRYNIFTYLRAGSGRYRYQKVGYWAEGLTLDTSLIPWASPSAGPLAASRCSEPCLQNEVKSVQPGEVCCWLCIPCQPYEYRLDEFTCADCGLGYWPNASLTGCFELPQEYIRWGDAWAVGPVTIACLGALATLFVLGVFVRHNATPVVKASGRELCYILLGGVFLCYCMTFIFIAKPSTAVCTLRRLGLGTAFSVCYSALLTKTNRIARIFGGAREGAQRPRFISPASQVAICLALISGQLLIVVAWLVVEAPGTGKETAPERREVVTLRCNHRDASMLGSLAYNVLLIALCTLYAFNTRKCPENFNEAKFIGFTMYTTCIIWLALLPIFYVTSSDYRVQTTTMCVSVSLSGSVVLGCLFAPKLHIILFQPQKNVVSHRAPTSRFGSAAARASSSLGQGSGSQFVPTVCNGREVVDSTTSSL

SEQ ID NO: 26 - protein, 872 aa, Rattus norvegicus
MESLLGFLALLLLWGAVAEGPAKKVLTLEGDLVLGGLFPVHQKGGPAEECGPVNEHRGIQRLEAMLFALDRINRDPHLLPGVRLGAHILDSCSKDTHALEQALDFVRASLSRGADGSRHICPDGSYATHSDAPTAVTGVIGGSYSDVSIQVANLLRLFQIPQISYASTSAKLSDKSRYDYFARTVPPDFFQAKAMAEILRFFNWTYVSTVASEGDYGETGIEAFELEARARNICVATSEKVGRAMSRAAFEGVVRALLQKPSARVAVLFTRSEDARELLAATQRLNASFTWVASDGWGALESVVAGSERAAEGAITIELASYPISDFASYFQSLDPWNNSRNPWFREFWEERFHCSFRQRDCAAHSLRAVPFEQESKIMFVVNAVYAMAHALHNMHRALCPNTTHLCDAMRPVNGRRLYKDFVLNVKFDAPFRPADTDDEVRFDRFGDGIGRYNIFTYLRAGSGRYRYQKVGYWAEGLTLDTSFIPWASPSAGPLPASRCSEPCLQNEVKSVQPGEVCCWLCIPCQPYEYRLDEFTCADCGLGYWPNASLTGCFELPQEYIRWGDAWAVGPVTIACLGALATLFVLGVFVRHNATPVVKASGRELCYILLGGVFLCYCMTFVFIAKPSTAVCTLRRLGLGTAFSVCYSALLTKTNRIARIFGGAREGAQRPRFISPASQVAICLALISGQLLIVAAWLVVEAPGTGKETAPERREVVTLRCNHRDASMLGSLAYNVLLIALCTLYAFKTRKCPENFNEAKFIGFTMYTTCIIWLAFLPIFYVTSSDYRVQTTTMCVSVSLSGSVVLGCLFAPKLHIILFQPQKNVVSHRAPTSRFGSAAPRASANLGQGSGSQFVPTVCNGREVVDSTTSSL

SEQ ID NO: 27 - protein, 940 aa, Fugu rubripes
MVRLVLHYLILLGSGYVISTYGPNQRAQMTGDILLGGLFPIHFGISSKDENLAARPESTKCVRFNFRGFRWLQAMVFAIEEINNSSSLLPNITLGYRIFDTCNTVSKALEATLSFVAQNKIDSLNLDEFCNCTDHIPATIAVVGAAGSAVSTAVANLLSLFYIPQISYASSSRLLSNKNQYKSFMRTIPTDEHQATAMADVIEYFQWNWVIAVASDDDYGRPGIEKFEKEMEERDICIHLNELISQYFEDCEIKALVDRIENSTAKVIVVFASGPDIEPLIKEMVRRNITDRIWLASEAWASSSLIAKPEYLDVVEGTIGFVLKAGNIPGFREFLQQVQPKRGSHNEFVREFWEETFNCYLEDSPRLQESENGSDSFRPLCTSEEDITSVETPYLDHTHLRISYNVYVAVYSIAHALQDILSCTPGHGLFANNSCADIKKMEAWQVLKQLRHLNYTNSMGEKVHFDENADMEANYTIINWHRSAEDGSVAFREVGYYHMHARRGAKLLIDNTKMMWNAYSSEVPFSNCSEDCEPGTRKGIIDSMPTCCFECTECSDGEYSDHKDASICTKCPNNSWSSGNHTFCFLKEIEFLAWSEPFGIALAICAVLGVLLTAFVMGVFVRFRNTPIVKASNRELSYVLLLSLICCFSSSLIFIGEPQDWTCRLRQPAFGISFVLCISCILVKTNRVLLVFEAKIPTSIHRKWWGLNLQFLLVFLCTFVQVMICVVWLYNAPPSSYRNHDIDEIIFITCNEGSVMALGFLIGYTCLLAAICFFFAFKSRKLPENFTEAKFITFCMLIFFIVWISFIPAYFSTYGKFVSAVEAIAILASSYGMLACIFFNKVYIILFKPCRNTIEEVRCSTAAHAFRVAAKATLKHRTTVRKKSNSIGSTASTPSSSISLKTNSNDCDSASGRHRPRVSFGSGTVMLSLSFEESRRSSLM

SEQ ID NO: 28 - protein, 868 aa, Fugu rubripes
MEISVIFLCFISLFDLNSAGDLKAPENSLKQQVGPREDTTGAAAPSDICRLQGSARLPAFSKDGDFVIGGVFSIHRYTVTVNHNYTTMPEPFRCRVIDHHELQLSHAMVFAIEEINNSTELLPGIKLGYQIHDSCAAVPIAVNVAFQLLNTLDPVFVTGDNCSQSGMVMAVVGESGSTPSISISRVIGSFDIPLVSHFATCACLSDKQKYPSFFRTIPSDQFQADALVKLIKHFGWTWIGAVCSDSDYGNNGMAAFLHAAQKEGICVEYSESFYRTHPHSRIKRVADVIRRSTAVVVVAFTASTEMMILLEELSHEPSPPRQWIGSESWVTDPDLLRFSFCAGTIGFAIQRSVIPGLRDFLLDLSPSKVASSPVLTEFWEDSFNCRLGKGERMCDGSEDIMTLQSPYTDTSELRITNMVYKAVYAIAHAIHNAVCQDTNATTRCSKFTTINPKKVLTQLKTVNFSQNGYAVSFDANGDPVASYELVNWKKSGSGSIEVVPVGYYDASLPEGQEFRIFRDITWVDGRKQVPVSVCSDSCPQGTRKVLQKGKPICCYDCVQCPEGEISNVTDSPECIPCLDDFWPNPERNACFPKPVEFLSFNEVLGIILAVFSVGGACLAVITAAVFFHHRTSPIVRANNSELSFLLLFSLTLCFLCSLTFIGAPSHLSCMLRHTAFGITFVLCISCVLGKTVVVLMAFRATLPGSNVMKWFGPPQQRMTVVTFTSIQVLICIVWLVVNPPFPVRNLTTYKERIILECALGSSVGFWAVLGYIGLLAAVCLVLAVLARKLPDNFNEAKMITFSMLIFCAVWITFIPAYVSSPGKFTVAVEIFAILASSFGLILCIFAPKCFIILFKPEKNSKKHLMNKK

SEQ ID NO: 29 - protein, 864 aa, Fugu rubripes
MADITGTLGLFFTLITLFVSSSTSFNAPTCKLWRKFQLNEMHEPGDVLLGGLFQVHYSSVFPEWTFTSEPHQPVCTRFDILGFRHAMTMAFAVQEINKNPDLLPNLTLGYRLYDNCGALVVGFSGALALASGQEEAFALQGGCAGSPPVLGIVGDSLSTFTIASASVLGLYKIPMVSYFATCSCLTNRQRFPSFFRTIPSDDFQVRAMIQILKHFGWTWVGLLVSDDDYGLHVARSFQSDLVQSGQGCLAYLEVLPWDNYLSENRRIVHVIKESTARVLMVFAHQSHMIHLMEEVVRQKVTGLQWLASEAWTGTTFLQTPDFMPYLNGTLGIAIRRGEITGLRDFLLRIRPGQSSNNTSYDMVQQFWEYSFQCKFGASGSAEACTGDENIQQVDAEFLDVSNLRPEYNIYKAVYALAYALDDMLQCEPGRGPFSGGSCADIHKLEPWQFVHYLQHVNFTTTFGDQVSFDENGDVLPIYDILNWQWLPDGRTQVQNVGEVKRSPSRGEELQIHEDKIFWNFESNKPPHSVCSESCPPGTRMSRKKGQPVCCFDCLLCSEGKISNTTDSMECTSCPEDFWSSPQRDHCVPKKTEFLSYHEPLGICLTAASLLGTVISVVVLGIFIHHRSTPVVRANNSELSFLLLVSLKLCFLCSLLFIGRPRLWTCQLRHAAFGISFVLCVSCILVKTMVVLAVFRASKPGGGATLKWFGAVQQRGTVLGLTSIQAAICFAWLLSSSPKPHKNIQYHKDKIVFECVVGSTVGFAVLLSYIGLLAILSFLLAFLARNLPDNFNEAKLITFSMLIFCAVWVAFVPAYINSPGKYADAVEVFAILTSSFGLLVALFGPKCYIILFRPERNTKRAIMAR

SEQ ID NO: 30 - protein, 856 aa, Fugu rubripes
MPVCVCVMLLFALFHGAFGAEDNLKCKMLGRPEFPLLSQEGDITIGGAFTLHSQMSKPSLSFEETPEDLTCSRINLREFRFAQTMIFAIEEINNSSSLLPNISIGYKVFDTCGLTLPSTRAVMALMNGKTRTPEGGCSSRTSVHAIIGASESSSTIVMLQISGIFQIPVISHFATCACLSNRKEYPSFFRTIPSDFYQSRALAKLVKHFGWTWVGAVKSDNDYGNNGLATFIMAAEQEGVCVEYSEGFSWTDPSEQIARVVTVIKSGSARVLVAFLAQSEMSALLEEAVKQNLTGLQWVGSESWITAGHLALKKYSAILTGSLGFTIRKTKITGLQEFLLQVNPSQNPQNNLLKEFWETTFGCSFQSDVHGATQCSGVEKLKDIQNPFTDVSELRISNNVYKAVYAVAHAMHSMLKCGQSGEAVNQSCTTKKDFELKQVVEHLQSVNFTLQSGERVYFDDYGDPAATYELVNWQRSPEGNTVFVVVGNYDASQPNGRQFTMNNINITWAARLQKRPLSVCSQSCIPGFRQAVIKGKPICCFTCVACAAGEISNSSNSAECLQCPLEFWSNEDHSQCVPKVIEFLSFEETMGALLAAVSLFGAALTSLVFCVFFRFRHTPLVKASNSELSFLLLFSLTLCFLCSLTFIGRPSRWSCVLRHTAFGITFALCMSCVLAKTVAVLFAFTAKRPGNTVFYCSVPLQRTSVFACITLQVIICVLWLTLAPPHPHKNTAHAKERIILECNLGSPVWFWVVLGYIGLLAVICFILAFLARKLPDNFNEAKFITFSMLIFCAVWVTFIPAYVSSPGKFTVAVEIFAILASSFGLLFCIFAPKCYILILKPEKNTKKHMMGRNHQN

SEQ ID NO: 31 - protein, 880 aa, Fugu rubripes
MSWMGWIPSQRGVQLLCLLCCMIIPVVIALLDQSQHCRVIPGSMSLPVLEKRGDIILGGLFSLHDMVVEPNLPFTSTPPPTQCTRFSFRTFRWMQTMIFAVEEINRNAEILPNITLGYKIYDSCSTPHQSLKAAIDLMGSEKDSQFEGKLQREGCDGNVPAVIGDGGSTQSLVVARFLGVFHVPQVSYFSSCACLSDKTQFPAFLRTMPSDLFQVGALVQLVKYFGWTWVGVIAGDDAYGRGGAAIFANEVRRLGACIALYEMIPKTQSQAAISSIISNIRSSGARVVLVFAVEQDVARLFDEAVRQKLTGIQWLASEAWSTAAILSTPKRYHHILQGSMGFAIRRADIPGLQDFLLRLHPSSAEADDDPFLIPFWEEVFQCSLDPHGHSEAKRPCSGTEELRSVKNIYSDVSQLRISYNVYKAVYALAYAIKAMRSCEKGSGPFSQQACPDLDNIHPWQLHHYIKQVNYTNRFGDEIKFDENGDPAAMYDLINWQLTPGGDMDFVTVGKFDDIAGTGRKNLHIEEEKIVWNGNNTQVPLSVCSSICPPGTRKAIRPNYPICCHDCVVCTAGEISNQTDAIECARCLPEFWSNADRTACVPKQVEFLSFGDTIGIALLVVSLIGSFLTCAVALVFFYHRTSPIVRANNSDLSFLLLFSLTLCFLCSLTFISPPSQWSCMLRHTAFGITFVLCISCILGKTIVVLMAFRATLPGSDVMKWFGPGKQKAIITFSTLVQVVICTVWLVVAPPTPRQYMPRESAIIILLCDEGSTIAFSLVLGYIGVLACMCFLLAFLARKLPDNFNEARLIAFSMLIFCAVWVAFVPAYISSPGKYSTLTEIFAILASSYGLLGCIFAPKCYIILMKSEKNTRKHLMSKSERF

SEQ ID NO: 32 - protein, 875 aa, Fugu rubripes
MSQLSRIFTLIVGFGGRELGLGGVLQVVQALTCSQWSTPTEQGLFQDGHVVVGGLFNLHYTPPDTANNFTQQSHYKACTGLENLPLQYIYAMVFAVEEINHSAALLPGVKLGYHIRDSCALHPWTTQAALALVAGDSASCELATPADYSAETSEEKGAASVPLIIGGASSNAAKILLGTLSPLSISYTASCPCLSDRHRYPTFFRTMASDIYQAQALAQLVLRFNWTWIGAVVANNDYGHVAVKVFQEQTQGKGVCLAFVETLQRETIVADAVRAARTIQASTARVILVFSWYTDVGHLFRQLQKINVTDRQFLASEAWSTSEVLLKDPDTSTVASGVVGVAIASQHIPGFDRFLRGLNPSLRPSDKFLQEFWEEEFGCSPSPPSSETSGDLNASLPPCSGAESLEGVQHPFTDTSHLRVTYNVYLAVYAAANALHSLLSCPIHNSPSGTSHCTSPKGIKTTELLQHLSKVNFTTPQGKHLYFRGADIPAMYDLINWQSGTDGTLQLVLIGAVAGFDLQLNESEIEWSAKYNQVPVSVCSESCPPGTRKANRKGEPLCCFDCIPCADGEISNTSGSLQCDRCPPEFWSNDGRTACVPRQLDFLSFNETLGVALTAVAVSGAVVTTAVFVVFLHYRHTPMVRANNSELSFLLLLSLKLCFLCSLVFIGRPSVWSCRFQQAAFGISFVLCVSCLQVKTIVVLAAFRSARPGAGALMKWFGPSQQRGSVCIFTCVQARVIICIVWLSLSPPVPQADLDVPGLQVTLECAMASVVGFSLVLGYIGLLACTCLLLAFLARKLPDNFNEAKLITFSMLIFCAVWVAFVPAYISSPGKYSVAVEIFAILASSYGLLFCIFAPKCFIILLRPEKNTKKHLMMR

SEQ ID NO: 33 - protein, 844 aa, Carassius auratus
MLLFLYTVLLFHHLHTKVENTICRIMGDPNYPLFSKDGDVTIGGIFAIHRKETLPSFEFTQKPQPLSCSSVNLRDFRLAQTMIFAIQEINKNEILLPNISIGYIIYDTCGSRLSTMTATMGLMNSQDFGPGNICNGHSPLHAIIGESETSATVILSRTTGPFKIPVISHSSSCECLSNRKNYPSFFRTISSDYHQSRALASIVKHFGWSWVGAVNSDNDYGNNGMAIFLKTVQEEGICVEYSVKFYRTETEKLKKVVDTIKKGTAKVIVAFISFVEMGLLIEQLSIQNITGFQMIGVEPWITANTYFTPKSLHAMEGSLGFAMKKINIEGFAEYAMKPFWDTAFPCSKSEGNYSKYALSCSRYEELLALKNYNEDVTEHRYSSNVYKAVYAVAHSLHSLLKCIKQEGCEKGLPIQPQQVVETLKKINFAIKTGDRVWFDSTGGVVALYEVVNWQQDSDGTYQFKSVGYYDASLPTYQNLHLNVENIIWAGGHLEKPRSACSESCPPGTRKAAQKGRPFCCYDCIPCAEGEISNETRFINCKPCPWEYWSNAEKNKCVLKAVEFLSFTEIMGVVLVFFSLFGVGLTLLVAILFYNKKDTPMVKANNSELSFLLLFSLTLCFLCSLTFIGRPTEWSCMLCHTAFGITFVLCISCVLGKTIVVLMAFKATLPGNNIMKWFGPAQQRLSVLAFTLIQVIICVLWLTISPPFPYKNMKYYKEKIILECSLGSTIGFWAVLTYISLLAFLCFILAFLARTLPDKFNEAKFITFSMLIFCAVWITFIPAYVSSPGKFTVAVEIFAILSSSFGLLFGIFAPKCYIILLKPEQNTKQHLIGKTASVSLALQAY

SEQ ID NO: 34 - protein, 848 aa, Carassius auratus
MEPLVALLHMIISIMTFSKANKMVCTLRGEPVHPELWKDGAIIVGGVFSFHSSWEIRQQTYSILPPPLKCISLNFRDFQYAQSMLFAIEEINNSSTLLPGISLGYKIYDTCGSVAAGVRAAMALANGYEKVSVEGPCTKHAEVQAIIGDTTSSACMAISKGIGPFKLPLISHYATCECLSDKVKYPSFLRTIASDHYQSRALAELVRHFGWTWVGALRTDDDYGNSGMATFTKVAEQMGICLEYSLPFFRTYPEDKVIRIIEQIKSSTSRVIVGFLAHWDLEVLLHKFVEHNITGYQWVGTEAWISDSVIASMDKHHILQGAIGLAIPKTQVTGLQEFILKIKPLKSSGGVIFTEFWEELFQCKYSTKNDSVSITPCTGNEELSQVQNLFTDMSLMPIFSNVYKGVYAVAHTLHDLLGCKEKCDLNKQPDPSTFLKHLRKVHFKTKDGEEVYFDENGDPVAKYDIINWHPSKKQHYEFVTVGLYDASFLGIDRLAVNMPSILWANNSTKVPVSVCSESCPPGTRKGVKKGKPICCYDCIPCTEGEISNTTDSVTCLRCHQDFWSNMQNDGCVKKETEFLSYEEIMGILLTTISLVGAFITIIIAVIFFRYKNTPIVKANNSELSFLLLFSLMLCFLCSLTFIGRPTEWSCMLRHTAFGITFVLCISCVLGKTIVVLMAFRATLPGSNVMKWFGPPQQRLSVFSFTLIQVIICVLWLTIYPPFPFKNLNYFKEKIILECNVGSVVGFWAVLGYIGLLAILCFFLAFLARKLPDNFNEAKFITFSMLIFCAVWIAFIPAYVSSPGKFTVAVEVFAILASTYGMLFCIFIPKCYIILLKPDKNSKKHLMVK

SEQ ID NO: 35 - protein, 842 aa, Mus musculus
MLFWAAHLLLSLQLAVAYCWAFSCQRTESSPGFSLPGDFLLAGLFSLHADCLQVRHRPLVTSCDRSDSFNGHGYHLFQAMRFTVEEINNSTALLPNITLGYELYDVCSESSNVYATLRVLAQQGTGHLEMQRDLRNHSSKVVALIGPDNTDHAVTTAALLSPFLMPLVSYEASSVILSGKRKFPSFLRTIPSDKYQVEVIVRLLQSFGWVWISLVGSYGDYGQLGVQALEELATPRGICVAFKDVVPLSAQAGDPRMQRMMLRLARARTTVVVVFSNRHLAGVFFRSVVLANLTGKVWIASEDWAISTYITNVPGIQGIGTVLGVAIQQRQVPGLKEFEESYVQAVTGAPRTCPEGSWCGTNQLCRECHAFTTWNMPELGAFSMSAAYNVYEAVYAVAHGLHQLLGCTSGTCARGPVYPWQLLQQIYKVNFLLHKKTVAFDDNGDPLGYYDIIAWDWNGPEWTFEVIGSASLSPVHLDINKTKIQWHGKNNQVPVSVCTRDCLEGHHRLVMGSHHCCFECMPCEAGTFLNTSELHTCQPCGTEEWAPEGSSACFSRTVEFLGWHEPISLVLLAANTLLLLLLIGTAGLFAWRLHTPVVRSAGGRLCFLMLGSLVAGSCSLYSFFGEPTVPACLLRQPLFSLGFAIFLSCLTIRSFQLVIIFKFSTKVPTFYHTWAQNHGAGIFVIVSSTVHLFLCLTWLAMWTPRPTREYQRFPHLVILECTEVNSVGFLVAFAHNILLSISTFVCSYLGKELPENYNEAKCVTFSLLLHFVSWIAFFTMSSIYQGSYLPAVNVLAGLATLSGGFSGYFLPKCYVILCRPELNNTEHFQASIQDYTRRCGTT

SEQ ID NO: 36 - protein, 872 aa, Homo sapiens [sequence omitted]

SEQ ID NO: 37 - protein, 877 aa, Carassius auratus
MAGLDLSLVLMLSVLAGVREVSLTQVNQQGVIAPGDIIIGGLFPIHEAAEAVNFTGLNSFSSFQHPVCNRYYTKGLNQALAMIHAVEMANQSPMLSSLNLTLGYRIYDTCSDVTTALWAVQDLTRPYSYCDSQTNSSQPVQPIMAVIGPSSSEISIAVARELNLLMIPQISYASTATILSDKSRFPAFMRTVPNDEYQTHAMVQLLKDNKWTWVGIIITDGDYGRSAMESFVKHTEREGICVAFKVILPDSLADEQKLNIHINETVDIIEKNTKVNVVVSFAKSSQMKLLYEGLRSRNVPKNKVWVASDNWSTSKNILKDVNLSDIGNILGFTFKSGNVTAFLQYLKDLKFGSEAKMNNSFLEEFLKLPEIGNAANAVQEQIKNTHLDMVFSVQMAVSAIAKAVVELCVERQCKTPSAIQPWELLKQLRNVTFEKEGVMYNFDANGDINLGYDVCLWDDDESEKNDIIAEYYPSNSSFTFTRKNLSNIENVLSKCSDSCQPGEYKKTAEGQHTCCYECLACAENQYSNHTDADTCSKCDTESLWSNANSSKCYPKFYEYFEWNSGFAIALLTLAALGILLLISMSALFFWQRNSLVVKAAGGPLCHLILFSLLGSFISVIFFVGEPSNESCRVRQVIFGLSFTLCVSCILVKSLKILLAFQMNLELKELLRKLYKPYVIVCMCMGLQVTICTLWLTLHRPFIEKVVQPKSILLECNEGSDLMFGLMLGYIVLLALICFTFAYKGRKLPQKYNEAKFITFGMLIYLMAWVIFIPVHVTTSGKYVPAVEVVVILISNYGILSCHFLPKCYIIIFKKEYNTKDAFLKNVFEYARKSSENIRGLSGTDPHSKTDNSVYVISNPSLVPEEKQVSVPEIDNVL

SEQ ID NO: 38 - protein, 843 aa, Rattus norvegicus
MGPQARTLCLLSLLLHVLPKPGKLVENSDFHLAGDYLLGGLFTLHANVKSISHLSYLQVPKCNEFTMKVLGYNLMQAMRFAVEEINNCSSLLPGVLLGYEMVDVCYLSNNIHPGLYFLAQDDDLLPILKDYSQYMPHVVAVIGPDNSESAITVSNILSHFLIPQITYSAISDKLRDKRHFPSMLRTVPSATHHIEAMVQLMVHFQWNWIVVLVSDDDYGRENSHLLSQRLTKTSDICIAFQEVLPIPESSQVMRSEEQRQLDNILDKLRRTSARVVVVFSPELSLYSFFHEVLRWNFTGFVWIASESWAIDPVLHNLTELRHTGTFLGVTIQRVSIPGFSQFRVRRDKPGYPVPNTTNLRTTCNQDCDACLNTTKSFNNILILSGERVVYSVYSAVYAVAHALHRLLGCNRVRCTKQKVYPWQLLREIWHVNFTLLGNRLFFDQQGDMPMLLDIIQWQWDLSQNPFQSIASYSPTSKRLTYINNVSWYTPNNTVPVSMCSKSCQPGQMKKSVGLHPCCFECLDCMPGTYLNRSADEFNCLSCPGSMWSYKNDITCFQRRPTFLEWHEVPTIVVAILAALGFFSTLAILFIFWRHFQTPMVRSAGGPMCFLMLVPLLLAFGMVPVYVGPPTVFSCFCRQAFFTVCFSICLSCITVRSFQIVCVFKMARRLPSAYSFWMRYHGPYVFVAFITAIKVALVVGNMLATTINPIGRTDPDDPNIMILSCHPNYRNGLLFNTSMDLLLSVLGFSFAYMGKELPTNYNEAKFITLSMTFSFTSSISLCTFMSVHDGVLVTIMDLLVTVLNFLAIGLGYFGPKCYMILFYPERNTSAYFNSMIQGYTMRKS

SEQ ID NO: 39 - protein, 840 aa, Rattus norvegicus
MLFWAAHLLLSLQLVYCWAFSCQRTESSPGFSLPGDFLLAGLFSLHGDCLQVRHRPLVTSCDRPDSFNGHGYHLFQAMRFTVEEINNSSALLPNITLGYELYDVCSESANVYATLRVLALQGPRHIEIQKDLRNHSSKVVAFIGPDNTDHAVTTAALLGPFLMPLVSYEASSVVLSAKRKFPSFLRTVPSDRHQVEVMVQLLQSFGWVWISLIGSYGDYGQLGVQALEELAVPRGICVAFKDIVPFSARVGDPRMQSMMQHLAQARTTVVVVFSNRHLARVFFRSVVLANLTGKVWVASEDWAISTYITSVTGIQGIGTVLGVAVQQRQVPGLKEFEESYVRAVTAAPSACPEGSWCSTNQLCRECHTFTTRNMPTLGAFSMSAAYRVYEAVYAVAHGLHQLLGCTSEICSRGPVYPWQLLQQIYKVNFLLHENTVAFDDNGDTLGYYDIIAWDWNGPEWTFEIIGSASLSPVHLDINKTKIQWHGKNNQVPVSVCTTDCLAGHHRVVVGSHHCCFECVPCEAGTFLNMSELHICQPCGTEEWAPKESTTCFPRTVEFLAWHEPISLVLIAANTLLLLLLVGTAGLFAWHFHTPVVRSAGGRLCFLMLGSLVAGSCSFYSFFGEPTVPACLLRQPLFSLGFAIFLSCLTIRSFQLVIIFKFSTKVPTFYRTWAQNHGAGLFVIVSSTVHLLICLTWLVMWTPRPTREYQRFPHLVILECTEVNSVGFLLAFTHNILLSISTFVCSYLGKELPENYNEAKCVTFSLLLNFVSWIAFFTMASIYQGSYLPAVNVLAGLTTLSGGFSGYFLPKCYVILCRPELNNTEHFQASIQDYTRRCGTT

SEQ ID NO: 40 - protein, 687 aa, Homo sapiens [sequence omitted]

SEQ ID NO: 41 - protein, 693 aa, Homo sapiens
MTPQSLLQTTLFLLSLLFLVQGAHGRGHREDFRFCSQRNQTHRSSLHYKPTPDLRISIENSEEALTVHAPFPAAHPASRSFPDPRGLYHFCLYWNRHAGRLHLLYGKRDFLLSDKASSLLCFQHQEESLAQGPPLLATSVTSWWSPQNISLPSAASFTFSFHSPPHTAAHNASVDMCELKRDLQLLSQFLKHPQKASRRPSAAPASQQLQSLESKLTSVRFMGDMVSFEEDRINATVWKLQPTAGLQDLHIHSRQEEEQSEIMEYSVLLPRTLFQRTKGRSGEAEKRLLLVDFSSQALFQDKNSSQVLGEKVLGIVVQNTKVANLTEPVVLTFQHQLQPKNVTLQCVFWVEDPTLSSPGHWSSAGCETVRRETQTSCFCNHLTYFAVLMVSSVEVDAVHKHYLSLLSYVGCVVSALACLVTIAAYLCSRVPLPCRRKPRDYTIKVHMNLLLAVFLLDTSFLLSEPVALTGSEAGCRASAIFLHFSLLTCLSWMGLEGYNLYRLVVEVFGTYVPGYLLKLSAMGWGFPIFLVTLVALVDVDNYGPIILAVHRTPEGVIYPSMCWIRDSLVSYITNLGLFSLVFLFNMAMLATMVVQILRLRPHTQKWSHVLTLLGLSLVLGLPWALIFFSFASGTFQLVVLYLFSIITSFQGFLIFIWYWSMRLQARGGPSPLKSNSDCARLPISSGSTSSSRI

SEQ ID NO: 42 - protein, 687 aa, Mus musculus
MAVQVLRQMVYFLLSLFSLVQGAHSGSPREDFRFCGQRNQTQQSTLHYDQSSEPHIFVWNTEETLTIRAPFLAAPDIPRFFPEPRGLYHFCLYWSRHTGRLHLRYGKHDYLLSSQASRLLCFQKQEQSLKQGAPLIATSVSSWQIPQNTSLPGAPSFIFSFHNAPHKVSHNASVDMCDLKKELQQLSRYLQHPQKAAKRPTAAFISQQLQSLESKLTSVSFLGDTLSFEEDRVNATVWKLPPTAGLEDLHIHSQKEEEQSEVQAYSLLLPRAVFQQTRGRRRDDAKRLLVVDFSSQALFQDKNSSQVLGEKVLGIVVQNTKVTNLSDPVVLTFQHQPQPKNVTLQCVFWVEDPASSSTGSWSSAGCETVSRDTQTSCLCNHLTYFAVLMVSSTEVEATHKHYLTLLSYVGCVISALACVFTIAAYLCSRRKSRDYTIKVHMNLLSAVFLLDVSFLLSEPVALTGSEAACRTSAMFLHFSLLACLSWMGLEGYNLYRLVVEVFGTYVPGYLLKLSIVGWGFPVFLVTLVALVDVNNYGPIILAVRRTPERVTYPSMCWIRDSLVSYVTNLGLFSLVFLFNLAMLATMVVQILRLRPHSQNWPHVLTLLGLSLVLGLPWALVFFSFASGTFQLVILYLFSIITSYQGFLIFLWYWSMRFQAQGGPSPLKNNSDSAKLPISSGSTSSSRI

SEQ ID NO: 43 - protein, 541 aa, Homo sapiens
MDFESGQVDPLASVILPPNLLENLSPEDSVLVRRAQFTFFNKTGLFQDVGPQRKTLVSYVMACSIGNITIQNLKDPVQIKIKHTRTQEVHHPICAFWDLNKNKSFGGWNTSGCVAHRDSDASETVCLCNHFTHFGVLMDLPRSASQLDARNTKVLTFISYIGCGISAIFSAATLLTYVAFEKLRRDYPSKILMNLSTALLFLNLLFLLDGWITSFNVDGLCIAVAVLLHFFLLATFTWMGLEAIHMYIALVKVFNTYIRRYILKFCIIGWGLPALVVSVVLASRNNNEVYGKESYGKEKGDEFCWIQDPVIFYVTCAGYFGVMFFLNIAMFIVVMVQICGRNGKRSNRTLREEVLRNLRSVVSLTFLLGMTWGFAFFAWGPLNIPFMYLFSIFNSLQGLFIFIFHCAMKENVQKQWRQHLCCGRFRLADNSDWSKTATNIIKKSSDNLGKSLSSSSIGSNSTYLTSKSKSSSTTYFKRNSHTDSASMDKSLSKLAHADGDQTSIIPVHQVIDKVKGYCNAHSDNFYKNIIMSDTFSHSTKF

SEQ ID NO: 44 - protein, 823 aa, Homo sapiens [sequence omitted]

SEQ ID NO: 45 - protein, 466 aa, Mus musculus
MVLLSENASEGSNCTHPPAQVNISKAILLGVILGGLIIFGVLGNILVILSVACHRHLHSVTHYYIVNLAVADLLLTSTVLPFSAIFEILGYWAFGRVFCNIWAAVDVLCCTASIMGLCIISIDRYIGVSYPLRYPTIVTQRRGVRALLCVWALSLVISIGPLFGWRQQAPEDETICQINEEPGYVLFSALGSFYVPLTIILVMYCRVYVVAKRESRGLKSGLKTDKSDSEQVTLRIHRKNVPAEGSGVSSAKNKTHFSVRLLKFSREKKAAKTLGIVVGCFVLCWLPFFLVMPIGSFFPNFKPPETVFKIVFWLGYLNSCINPIIYPCSSQEFKKAFQNVLRIQCLRRRQSSKHALGYTLHPPSQAVEEQHRGMVRIPVGSGETFYKISKTDGVCEWKFFSSMPQGSARITMPKDQSACTTARVRSKSFLQVCCCVGSSTPRPEENHQVPTIKIHTISLGENGEEV

SEQ ID NO: 46 - protein, 466 aa, Rattus norvegicus
MVLLSENASEGSNCTHPPAPVNISKAILLGVILGGLIIFGVLGNILVILSVACHRHLHSVTHYYIVNLAVADLLLTSTVLPFSAIFEILGYWAFGRVFCNIWAAVDVLCCTASIMGLCIISIDRYIGVSYPLRYPTIVTQRRGVRALLCVWVLSLVISIGPLFGWRQPAPEDETICQINEEPGYVLFSALGSFYVPLAIILVMYCRVYVVAKRESRGLKSGLKTDKSDSEQVTLRIHRKNVPAEGGGVSSAKNKTHFSVRLLKFSREKKAAKTLGIVVGCFVLCWLPFFLVMPIGSFFPDFKPSETVFKIVFWLGYLNSCINPIIYPCSSQEFKKAFQNVLRIQCLRRRQSSKHALGYTLHPPSQALEGQHRDMVRIPVGSGETFYKISKTDGVCEWKFFSSMPQGSARITVPKDQSACTTARVRSKSFLQVCCCVGSSAPRPEENHQVPTIKIHTISLGENGEEV

SEQ ID NO: 47 - protein, 466 aa, Homo sapiens
MVFLSGNASDSSNCTQPPAPVNISKAILLGVILGGLILFGVLGNILVILSVACHRHLHSVTHYYIVNLAVADLLLTSTVLPFSAIFEVLGYWAFGRVFCNIWAAVDVLCCTASIMGLCIISIDRYIGVSYPLRYPTIVTQRRGLMALLCVWALSLVISIGPLFGWRQPAPEDETICQINEEPGYVLFSALGSFYLPLAIILVMYCRVYVVAKRESRGLKSGLKTDKSDSEQVTLRIHRKNAPAGGSGMASAKTKTHFSVRLLKFSREKKAAKTLGIVVGCFVLCWLPFFLVMPIGSFFPDFKPSETVFKIVFWLGYLNSCINPIIYPCSSQEFKKAFQNVLRIQCLCRKQSSKHALGYTLHPPSQAVEGQHKDMVRIPVGSRETFYRISKTDGVCEWKFFSSMPRGSARITVSKDQSSCTTARVRSKSFLQVCCCVGPSTPSLDKNHQVPTIKVHTISLSENGEEV

SEQ ID NO: 48 - protein, 466 aa, Homo sapiens [sequence omitted]

SEQ ID NO: 49 - protein, 466 aa, Homo sapiens
MVFLSGNASDSSNCTQPPAPVNIPKAILLGVILGVLILFGVPGNILVILSVACHRHLHSVTHYYIVNLAVADLLLTSTVLPFSAIFEILGYWAFGRVFCNIWAAVDVLCCTASIMSLCIISIDRYIGVSYPLRYPTIVTQRRGLRALLCLWALSLVISIGPLFGWRQPAPQDETICQINEDPSYVLFSALGSFYVPLAIILVMYCRVYVVAKRESRGLTSGLKTDKSDSEQVTLRIHRKNAPLGGSGVASSKNKTHFSVRLLKFSREKKAAKTLGIVVGCFVLCWLPFFLVMPIGSFFPDFKPSETVFKIVFWLGYLNSCINPIIYPCSSQEFKKAFQNVLKIQCLRRKQSSKHALGYTLHPPSQAVEGQHKDMVRIPVGSRETFYKISKTDGVCEWKFFSSMPRGSARITVPKDQSACTTARVRSKSFLQVCCCVGPSTPNPGENHQVPTIKIHTISLSENGEEV

SEQ ID NO: 50 - protein, 429 aa, Oryctolagus cuniculus
MVFLSGNASDSSNCTHPPAPVNISKAILLGVILGGLILFGVLGNILVILSVACHRHLHSVTHYYIVNLAVADLLLTSTVLPFSAIFEILGYWAFGRVFCNIWAAVDVLCCTASIISLCVISIDRYIGVSYPLRYPTIVTQRRGLRALLCVWAFSLVISVGPLFGWRQPAPDDETICQINEEPGYVLFSALGSFYVPLTIILAMYCRVYVVAKRESRGLKSGLKTDKSDSEQVTLRIHRKNAPAGGSGVASAKNKTHFSVRLLKFSREKKAAKTLGIVVGCFVLCWLPFFLVMPIGSFFPDFKPPETVFKIVFWLGYLNSCINPIIYPCSSQEFKKAFQNVLKIQCLRRKQSSKHALGYTLHAPSQALEGQHKDMVRIPVGSGETFYKISKTDGVCEWKFFSSMPRGSARITVPKDQSACTTARCLEKEN

SEQ ID NO: 51 - protein, 466 aa, Bos taurus
MVFLSGNASDSSNCTHPPPPVNISKAILLGVILGGLILFGVLGNILVILSVACHRHLHSVTHYYIVNLAVADLLLTSTVLPFSAIFEILGYWAFGRVFCNVWAAVDVLCCTASIMGLCIISIDRYIGVSYPLRYPTIVTQKRGLMALLCVWALSLVISIGPLFGWRQPAPEDETICQINEEPGYVLFSALGSFYVPLTIILVMYCRVYVVAKRESRGLKSGLKTDKSDSEQVTLRIHRKNAQVGGSGVTSAKNKTHFSVRLLKFSREKKAAKTLGIVVGCFVLCWLPFFLVMPIGSFFPDFRPSETVFKIAFWLGYLNSCINPIIYPCSSQEFKKAFQNVLRIQCLRRKQSSKHTLGYTLHAPSHVLEGQHKDLVRIPVGSAETFYKISKTDGVCEWKIFSSLPRGSARMAVARDPSACTTARVRSKSFLQVCCCLGPSTPSHGENHQIPTIKIHTISLSENGEEV

SEQ ID NO: 52 - protein, 470 aa, Oryzias latipes
MTPSSVTLNCSNCSHVLAPELNTVKAVVLGMVLGIFILFGVIGNILVILSVVCHRHLQTVTYYFIVNLAVADLLLSSTVLPFSAIFEILDRWVFGRVFCNIWAAVDVLCCTASIMSLCVISVDRYIGVSYPLRYPAIMTKRRALLAVMLLWVLSVIISIGPLFGWKEPAPEDETVCKITEEPGYAIFSAVGSFYLPLAIILAMYCRVYVVAQKESRGLKEGQKIEKSDSEQVILRMHRGNTTVSEDEALRSRTHFALRLLKFSREKKAAKTLGIVVGCFVLCWLPFFLVLPIGSIFPAYRPSDTVFKITFWLGYFNSCINPIIYLCSNQEFKKAFQSLLGVHCLRMTPRAHHHHLSVGQSQTQGHSLTISLDSKGAPCRLSPSSSVALSRTPSSRDSREWRVFSGGPINSGPGPTEAGRAKVAKLCNKSLHRTCCCILRARTPTQDPAPLGDLPTIKIHQLSLSEKGESV

SEQ ID NO: 53 - protein, 391 aa, Branchiostoma lanceolatum
MSANTTVSPTETTANLTANSTEASVGSCFAPNPYSAGVQAVLGLITVILILLTVIGNVLVILAVTCHRKMRTVTNFFIVSLACADLSVGITVLPFAATNDILGYWPFGGYCDVWVSFDVLNSTASILNLVVIAFDRFLAITAPFTYHTRMTERTAGILIATVWGISLVVSFLPIQAGWYRDNQSEEALAIYSDPCLCIFTASTAYTIVSSLISFYIPLLIMLVFYGIIFKAARDQARKINALEGRLEQENNRGKKISLAKEKKAAKTLGIIMGVFILCWLPFFVVNIVNPFCDRCVQPAVFIALTWLGWINSCFNPIIYAFNKEFRKVFVKMICCHKCRGVTVGPNHADLNYDPVAMRLKKRGENANGTVNGDANGKANGNIEAGEGTSSS

SEQ ID NO: 54 - protein, 423 aa, Fugu rubripes
MDLRATSSNDSNATSGYSDTAAVDWDEGENATGSGSLPDPELSYQIITSLFLGALILCSIFGNSCVVAAIALERSLQNVANYLIGSLAVTDLMVSVLVLPMAALYQVLNKWTLGQDICDLFIALDVLCCTSSILHLCAIALDRYWAITDPIDYVNKRTPRRAAVLISVTWLIGFSISIPPMLGWRSAEDRANPDACIISQDPGYTIYSTFGAFYIPLILMLVLYGRIFKAARFRIRKTVKKTEKAKASDMCLTLSPAVFHKRANGDAVSAEWKRGYKFKPSSPCANGAVRHGEEMESLEIIEVNSNSKTHLPLPNTPQSSSHENINEKTTGTRRKIALARERKTVKTLGIIMGTFIFCWLPFFIVALVLPFCAENCYMPEWLGAVINWLGYSNSLLNPIIYAYFNKDFQSAFKKILRCKFHRH

SEQ ID NO: 55 - protein, 407 aa, Homo sapiens
MSLNSSLSCRKELSNLTEEEGGEGGVIITQFIAIIVITIFVCLGNLVIVVTLYKKSYLLTLSNKFVFSLTLSNFLLSVLVLPFVVTSSIRREWIFGVVWCNFSALLYLLISSASMLTLGVIAIDRYYAVLYPMVYPMKITGNRAVMALVYIWLHSLIGCLPPLFGWSSVEFDEFKWMCVAAWHREPGYTAFWQIWCALFPFLVMLVCYGFIFRVARVKARKVHCGTVVIVEEDAQRTGRKNSSTSTSSSGSRRNAFQGVVYSANQCKALITILVVLGAFMVTWGPYMVVIASEALWGKSSVSPSLETWATWLSFASAVCHPLIYGLWNKTVRKELLGMCFGDRYYREPFVQRQRTSRLFSISNRITDLGLSPHLTALMAGGQPLGHSSSTGDTGFSCSQDSGNLRAL

SEQ ID NO: 56 - protein, 835 aa, Homo sapiens [sequence omitted]

SEQ ID NO: 57 - protein, 835 aa, Homo sapiens [sequence omitted]

SEQ ID NO: 58 - protein, 724 aa, Mus musculus
MRGVRCPGLLVVCILLSLSGAGTQKAESKNCAKWCPINSKCVSNRSCVCKPGFSSEKELITNPAESCEDINECLLPGFSCGDFAMCKNSEGSYTCVCNLGYKLLSGAESFVNESENTCQDVDECSSGQHQCHNSTVCKNTVGSYKCHCRPGWKPTSGSLRGPDTICQEPPFPTWTLLPTAHSQTLLRFSVEVQNLLRDFNPATVNYTIQKLIEAVDKLLEDPMETQTQQVAAQLLSNLEQSLRTLAQFLPKGPFTYTSPSNTELSLMVKEQDNKDVTTVHHGQTWMELDWAVTAGAKISENGSSVAGILSSPNMEKLLGNTPLNLEQRRASLEDFYGSPIPSVSLKLLSNINSVFLTNTNTEKLASNVTFKFDFTSVESIEPRHELICAFWKAHNGNGYWDTDGCSMNGTGSCHCNHLTSFAILMAQYHVQDPRLELITKVGLLLSLICLLLCILTFLLVKPIQSSRTMVHLHLCICLFLGSIIFLVGVENEGGEVGLRCRLVAMMLHFCFLAAFCWMALEGVELYFLVVRVFQGQGLSTWQRCLIGYGVPLLIVAISMAVVKMDGYGHATYCWLDFRKQGFLWSFSGPVAFIIFCNAAIFVITVWKLTKKFSEINPNMKKLRKARVLTITAIAQLLVLGCTWGFGLFLFNPHSTWLSYIFTLLNCLQGLFLYVMLCLLNKKVREEYWKWACMVTGSKYTEFNSSTTGTGTSQTRALRSSESGM

SEQ ID NO: 59 - protein, 818 aa, Mus musculus
MRSVRCPGLLVVCILLSLSGAGTQKAEIKNCAKWCPINSKCVSNRSCVCKPGFSSEKELITNPAESCEDINECLLPGFSCGDFAMCKNSEGSYTCVCNLGYKLLSGAESFVNESENTCQASVNTGTTPVPSRIHTVTTAPGNLPEQTTTVHQTQMGDSEERTPKDVNECISGQNHCHQSTHCINKLGGYSCICRQGWKPVPGSPNGPVSTVCEDVDECSSGQHQCHNSTVCKNTVGSYKCHCRPGWKPTSGSLRGPDTICQEPPFPTWTLLPTAHSQTLLRFSVEVQNLLRDFNPATVNYTIQKLIEAVDKLLEDPMETQTQQVAAQLLSNLEQSLRTLAQFLPKGPFTYTSPSNTELSLMVKEQDNKDVTTVHHGQTWMELDWAVTAGAKISENGSSVAGILSSPNMEKLLGNTPLNLEQRRASLEDFYGSPIPSVSLKLLSNINSVFLTNTNTEKLASNVTFKFDFTSVESIEPRHELICAFWKAHNGNGYWDTDGCSMNGTGFCHCNHLTSFAILMAQYHVQDPRLELITKVGLLLSLICLLLCILTFLLVKPIQSSRTMVHLHLCICLFLGSIIFLVGVENEGGEVGLRCRLVAMMLHFCFLAAFCWMALEGVELYFLVVRVFQGQGLSTWQRCLIGYGVPLLIVAISMAVVKMDGYGHATYCWLDFRKQGFLWSFSGPVAFIIFCNAAIFVITVWKLTKKFSEINPNMKKLRKARVLTITAIAQLLVLGCTWGFGLFLFNPHSTWLSYIFTLLNCLQGLFLYVMLCLLNKKVREEYWKWACMVTGSKYTEFNSSTTGTGTSQTRALRSSESGM

SEQ ID NO: 60 - protein, 886 aa, Homo sapiens
MRGFNLLLFWGCCVMHSWEGHIRPTRKPNTKGNNCRDSTLCPAYATCTNTVDSYYCTCKQGFLSSNGQNHFKDPGVRCKDIDECSQSPQPCGPNSSCKNLSGRYKCSCLDGFSSPTGNDWVPGKPGNFSCTDINECLTSRVCPEHSDCVNSMGSYSCSCQVGFISRNSTCEDVNECADPRACPEHATCNNTVGNYSCFCNPGFESSSGHLSCQGLKASCEDIDECTEMCPINSTCTNTPGSYFCTCHPGFAPSSGQLNFTDQGVECRDIDECRQDPSTCGPNSICTNALGSYSCGCIVGFHPNPEGSQKDGNFSCQRVLFKCKEDVIPDNKQIQQCQEGTAVKPAYVSFCAQINNIFSVLDKVCENKTTVVSLKNTTESFVPVLKQISMWTKFTKEETSSLATVFLESVESMTLASFWKPSANVTPAVRAEYLDIESKVINKECSEENVTLDLVAKGDKMKIGCSTIEESESTETTGVAFVSFVGMESVLNERFFQDHQAPLTTSEIKLKMNSRVVGGIMTGEKKDGFSDPIIYTLENVQPKQKFERPICVSWSTDVKGGRWTSFGCVILEASETYTICSCNQMANLAVIMASGELTMDFSLYIISHVGIIISLVCLVLAIATFLLCRSIRNHNTYLHLHLCVCLLLAKTLFLAGIHKTDNKTGCAIIAGFLHYLFLACFFWMLVEAVILFLMVRNLKVVNYFSSRNIKMLHICAFGYGLPMLVVVISASVQPQGYGMHNRCWLNTETGFIWSFLGPVCTVIVINSLLLTWTLWILRQRLSSVNAEVSTLKDTRLLTFKAFAQLFILGCSWVLGIFQIGPVAGVMAYLFTIINSLQGAFIFLIHCLLNGQVREEYKRWITGKTKPSSQSQTSRILLSSMPSASKTG

SEQ ID NO: 61 - protein, 931 aa, Mus musculus
MWGFWLLLFWGFSGMYRWGMTTLPTLGQTLGGVNECQDTTTCPAYATCTDTTDSYYCTCKRGFLSSNGQTNFQGPGVECQDVNECLQSDSPCGPNSVCTNILGRAKCSCLRGFSSSTGKDWILGSLDNFLCADVDECLTIGICPKYSNCSNSVGSYSCTCQPGFVLNGSICEDEDECVTRDVCPEHATCHNTLGSYYCTCNSGLESSGGGPMFQGLDESCEDVDECSRNSTLCGPTFICINTLGSYSCSCPAGFSLPTFQILGHPADGNCTDIDECDDTCPLNSSCTNTIGSYFCTCHPGFASSNGQLNFKDLEVTCEDIDECTQDPLQCGLNSVCTNVPGSYICGCLPDFQMDPEGSQGYGNFNCKRILFKCKEDLILQSEQIQQCQAVQGRDLGYASFCTLVNATFTILDNTCENKSAPVSLQSAATSVSLVLEQATTWFELSKEETSTLGTILLETVESTMLAALLIPSGNASQMIQTEYLDIESKVINEECKENESINLAARGDKMNVGCFIIKESVSTGAPGVAFVSFAHMESVLNERFFEDGQSFRKLRMNSRVVGGTVTGEKKEDFSKPIIYTLQHIQPKQKSERPICVSWNTDVEDGRWTPSGCEIVEASETHTVCSCNRMANLAIIMASGELTMEFSLYIISHVGTVISLVCLALAIATFLLCRAVQNHNTYMHLHLCVCLFLAKILFLTGIDKTDNQTACAIIAGFLHYLFLACFFWMLVEAVMLFLMVRNLKVVNYFSSRNIKMLHLCAFGYGLPVLVVIISASVQPRGYGMHNRCWLNTETGFIWSFLGPVCMIITINSVLLAWTLWVLRQKLCSVSSEVSKLKDTRLLTFKAIAQIFILGCSWVLGIFQIGPLASIMAYLFTIINSLQGAFIFLIHCLLNRQVRDEYKKLLTRKTDLSSHSQTSGILLSSMPSTSKMG

SEQ ID NO: 62 - protein, 823 aa, Homo sapiens [sequence omitted]

SEQ ID NO: 63 - protein, 344 aa, Homo sapiens
KVLCVFWEHGQNGCGHWATTGCSTIGTRDTSTICRCTHLSSFAVLMAHYDVQEDPVLTVITYMGLSVSLLCLLLAALTFLLCKAIQNTSTSLHLQLSLCLFLAHLLFLVAIDQTGHKVLCSIIAGTLHYLYLATFTWMLLEALYLFLTARNLTVVNYSSINRFMKKLMFPVGYGVPAVTVAISAASRPHLYGTPSRCWLQPEKGFIWGFLGPVCAIFSVNLVLFLVTLWILKNRLSSLNSEVSTLRNTRMLAFKATAQLFILGCTWCLGILQVGPAARVMAYLFTIINSLQGVFIFLVYCLLSQQVREQYGKWSKGIRKLKTESEMHTLSSSAKADTSKPSTVN

SEQ ID NO: 64 - protein, 307 aa, Homo sapiens
CSSTGIRHRNLVTQEEDPVLTVITYMGLSVSLLCLLLAALTFLLCKAIQNTSTSLHLQLSLCLFLAHLLFLVAIDQTGHKVLCSIIAGTLHYLYLATLTWMLLEALYLFLTARNLTVVNYSSINRFMKKLMFPVGYGVPAVTVAISAASRPHLYGTPSRCWLQPEKGFIWGFLGPVCAIFSVNLVLFLVTLWILKNRLSSLNSEVSTLRNTRMLAFKATAQLFILGCTWCLGILQVGPAARVMAYLFTIINSLQGVFIFLVYCLLSQQVREQYGKWSKGIRKLKTESEMHTLSSSAKADTSKPSTVN

SEQ ID NO: 65 - protein, 652 aa, Homo sapiens
MQGPLLLPGLCFLLSLFGAVTQKTKTSCAKCPPNASCVNNTHCTCNHGYTSGSGQKLFTFPLETCNDINECTPPYSVYCGFNAVCYNVEGSFYCQCVPGYRLHSGNEQFSNSNENTCQDTTSSKTTEGRKELQKIVDKFESLLTNQTLWRTEGRQEISSTATTILRDVESKVLETALKDPEQKVLKIQNDSVAIETQAITDNCSEERKTFNLNVQMNSMDIRCSDIIQGDTQGPSAIAFISYSSLGNIINATFFEEMDKKDQVYLNSQVVSAAIGPKRNVSLSKSVTLTFQHVKMTPSTKKVFCVYWKSTGQGSQWSRDGCFLIHVNKSHTMCNCSHLSSFAVLMALTSQEEDPVLTVITYVGLSVSLLCLLLAALTFLLCKAIQNTSTSLHLQLSLCLFLAHLLFLVGIDRTEPKVLCSIIAGALHYLYLAAFTWMLLEGVHLFLTARNLTVVNYSSINRLMKWIMFPVGYGVPAVTVAISAASWPHLYGTADRCWLHLDQGFMWSFLGPVCAIFSANLVLFILVFWILKRKLSSLNSEVSTIQNTRMLAFKATAQLFILGCTWCLGLLQVGPAAQVMAYLFTIINSLQGFFIFLVYCLLSQQVQKQYQKWFREIVKSKSESETYTLSSKMGPDSKPSEGDVFPGQVKRKY

SEQ ID NO: 66 - protein, 872 aa, Homo sapiens
AEQTRNHLNAGDITYSVRAMDQLVGLLDVQLRNLTPGGKDSAARSLNKAMVETVNNLLQPQALNAWRDLTTSDQLRAATMLLHTVEESAFVLADNLLKTDIVRENTDNIKLEVARLSTEGNLEDLKFPENMGHGSTIQLSANTLKQNGRNGEIRVAFVLYNNLGPYLSTENASMKLGTEALSTNHSVIVNSPVITAAINKEFSNKVYLADPVVFTVKHIKQSEENFNPNCSFWSYSKRTMTGYWSTQGCRLLTTNKTHTTCSCNHLTNFAVLMAHVEVKHSDAVHDLLLDVITWVGILLSLVCLLICIFTFCFFRGLQSDRNTIHKNLCISLFVAELLFLIGINRTDQPIACAVFAALLHFFFLAAFTWMFLEGVQLYIMLVEVFESEHSRRKYFYLVGYGMPALIVAVSAAVDYRSYGTDKVCWLRLDTYFIWSFIGPATLIIMLNVIFLGIALYKMFHHTAILKPESGCLDNIKSWVIGAIALLCLLGLTWAFGLMYINESTVIMAYLFTIFNSLQGMFIFIFHCVLQKKVRKEYGKCLRTHCCSGKSTESSIGSGKTSGSRTPGRYSTGSQSRIRRMWNDTVRKQSESSFITGDINSSASLNREGLLNNARDTSVMDTLPLNGNHGNSYSIASGEYLSNCVQIIDRGYNHNETALEKKILKELTSNYIPSYLNNHERSSEQNRNLMNKLVNNLGSGREDDAIVLDDATSFNHEESLGLELIHEESDAPLLPPRVYSTENHQPHHYTRRRIPQDHSESFFPLLTNEHTEDLQSPHRDSLYTSMPTLAGVAATESVTTSTQTEPPPAKCGDAEDVYYKSMPNLGSRNHVHQLHTYYQLGRGSSDGFIVPPNKDGTPPEGSSKGPAHLVTSL

SEQ ID NO: 67 - protein, 842 aa, Mus musculus; identical to SEQ ID NO: 35

SEQ ID NO: 68 - protein, 842 aa, Mus musculus
MLFWAAHLLLSLQLAVAYCWAFSCQRTESSPGFSLPGDFLLAGLFSLHADCLQVRHRPLVTSCDRSDSFNGHGYHLFQAMRFTVEEINNSTALLPNITLGYELYDVCSESSNVYATLRVLAQQGTGHLEMQRDLRNHSSKVVALIGPDNTDHAVTTAALLSPFLMPLVSYEASSVILSGKRKFPSFLRTIPSDKYQVEVIVRLLQSFGWVWISLVGSYGDYGQLGVQALEELATPRGICVAFKNVVPLSAQAGDPRMQRMMLRLARARTTVVVVFSNRHLDGVFFRSVVLANLTGKVWIASEDWAISTNIPNVSGIQGIGTVLGVAIQQRQVPGLKEFEESYVQAVMGAPRTCPEGSWCGTNQLCRECHAFTTWNMPELGAFSMSAAYNVYEAVYAVAHGLHQLLGCTSGTCARGPVHPWQLLQQIYKVNFLLHKKTVAFDDKGDPLGYYDIIAWDWNGPEWTFEVIGSASLSPVHLDINKTKIQWHGKNNQVPVSVCTRDCLEGHHRLVMGSHHCCFECMPCEAGTFLNTSELHTCQPCGTEEWAPEGSSACFSRTVEFLGWHEPISLVLLAANTLLLLLLIGTAGLFAWRLHTPVVRSAGGRLCFLMLGSLVAGSCSLYSFFGKPTVPACLLRQPLFSLGFAIFLSCLTIRSFQLVIIFKFSTKVPTFYHTWAQNHGAGIFVIVSSTVHLFLCLTWLAMWTPRPTREYQRFPHLVILECTEVNSVGFLVAFAHNILLSISTFVCSYLGKELPENYNEAKCVTFSLLLHFVSWIAFFTMSSIYQGSYLPAVNVLAGLATLSGGFSGYFLPKCYVILCRPELNNTEHFQASIQDYTRRCGTT

SEQ ID NO: 69 - protein, 840 aa, Rattus norvegicus; identical to SEQ ID NO: 39

SEQ ID NO: 70 - protein, 843 aa, Rattus norvegicus; identical to SEQ ID NO: 38

SEQ ID NO: 71 - protein, 877 aa, Carassius auratus; identical to SEQ ID NO: 37

SEQ ID NO: 72 - protein, 1079 aa, Mus musculus; identical to SEQ ID NO: 23

SEQ ID NO: 73 - protein, 1079 aa, Rattus norvegicus; identical to SEQ ID NO: 24

SEQ ID NO: 74 - protein, 1078 aa, Homo sapiens; identical to SEQ ID NO: 22

SEQ ID NO: 75 - protein, 1085 aa, Bos taurus; identical to SEQ ID NO: 21

SEQ ID NO: 76 - protein, 940 aa, Fugu rubripes; identical to SEQ ID NO: 27

SEQ ID NO: 77 - protein, 844 aa, Carassius auratus; identical to SEQ ID NO: 33

SEQ ID NO: 78 - protein, 848 aa, Carassius auratus; identical to SEQ ID NO: 34

SEQ ID NO: 79 - protein, 856 aa, Fugu rubripes; identical to SEQ ID NO: 30

SEQ ID NO: 80 - protein, 868 aa, Fugu rubripes; identical to SEQ ID NO: 28

SEQ ID NO: 81 - protein, 880 aa, Fugu rubripes; identical to SEQ ID NO: 31

SEQ ID NO: 82 - protein, 864 aa, Fugu rubripes; identical to SEQ ID NO: 29

SEQ ID NO: 83 - protein, 875 aa, Fugu rubripes; identical to SEQ ID NO: 32

SEQ ID NO: 84 - protein, 912 aa, Mus musculus
MASRQISLALGFLAFLWAVLGAQNKTEEVQCRLMAKFNLSGYVDAKNHSLVIAGLFPIHSRIIPVDEAILEPVSPMCEGFNFRGFRWMKTMIHTIKEINERKDILPNHTLGYQIFDSCYTISKAMESSLVFLTGQEEFKPNFRNSTGSTLAALVGSGGSSLSVAASRILGLYYMPQVGYTSSCSILSDKFQFPSYLRVLPSDNLQSEAIVNLIKHFGWVWVGAIAADDDYGKYGVKTFKEKMESANLCVAFSETIPKVYSNEKMQKAVKAVKTSTAKVIVLYTSDIDLSLFVLEMIHHNITDRTWIATEAWITSALIAKPEYFPYFGGTIGFATPRSVIPGLKEFLYDVHPNKDPNDVLTIEFWQTAFNCTWPNSSVPYNVDHRVNMTGKEDRLYDMSDQLCTGEEKLEDLKNTYLDTSQLRITKQCKQAVYAIAHGLDHLSRCQEGQGPFGSNQQCAYIPTFDFWQLMYYMKEIKFKSHEDKWVILDDNGDLKNGHYDVLNWHLDDEGEISFVTVGRFNFRSTNFELVIPTNSTIFWNTESSRRPDSFCTQVCPPGTRKGIRQGQPICCFDCIPCADGYVSEKSGQRECDPCGEDDWSNAGKSKCVPKLVEFLAYGEALGFTLVILSIFGALVVLAVTVVYVIHRHTPLVKANDRELSFLIQMSLVITVLSSLLFIGKPCNWSCMARQITLALGFCLCLSSILGKTISLFFAYRISVSKTRLISMHPIFRKLIVLVCVVGEIGVCAAYLVLEPPRMFKNIEIQNVKIIFECNEGSVEFLCSIFGFDVLRALLCFLTTFVARQLPDNYYEGKCITFGMLVFFIVWISFVPAYLSTKGKFKVAVEIFAILASSYGLLGCLFLPKCFIILLRPKRNTDETVGGRVPTVDRSIQLTSASVSSELNSTTVSTVLDE

SEQ ID NO: 85 - protein, 872 aa, Homo sapiens [sequence omitted]

SEQ ID NO: 86 - protein, 854 aa, Homo sapiens
MLGPTVLGLSLWALLHPGTGAPLCLSQQLRMKGDYVLGGLFPLGEAEEAGLRSRTRPPSAVLCGPRFSSNGLLWALAMKMAVEEINNKSDLLPGLRLGYDLFDTCSEPVVAMKPSLMFLAKAGSRDIAAYCNYTQYQPRVLAVIGPHSSELAMVTGKFFSFFLMPQVSYGASMELLSARETFPSFFRTVPSDRVQLTAAAELLQEFGWNWVAALGSDDEYGRQGLSIFSALAAARGICIAHEGLVPLPRADDSRLGKVQDVLHQVNQSSVQVVLLFASVHAAHALFNYSISSRLSPKVWVASEAWLTSDLVMGLPGMAQMGTVLGFLQRGAQLHEFPQYVKTHLALATDPAFCSALGEREQGLEEDVVGQRCPQCDCITLQNVSAGLNHHQTFSVYAAVYSVAQALHNTLQCNASGCPAQDPVKPWQLLENMYNLTFHVGGLPLRFDSSGNVDMEYDLKLWVWQGSVPRLHDVGRFNGSLRTERLKIRWHTSDNQVPVSRCSRQCQEGQVRRVKGFHSCCYDCVDCEAGSYRQNPDDIACTFCGQDEWSPERSTRCFRRRSRFLAWGEPAVLLLLLLLSLALGLVLAALGLFVHHRDSPLVQASGGPLACFGLVCLGLVCLSVLLFPGQPSPARCLAQQPLSHLPLTGCLSTLFLQAAEIFVESELPLSWADRLSGCLRGPWAWLVVLLAMLVEVALCTWYLVAFPPEVVTDWHMLPTEALVHCRTRSWVSFGLAHATNATLAFLCFLGTFLVRSQPGRYNRARGLTFAMLAYFITWVSFVPLLANVQVVLRPAVQMGALLLCVLGILAAFHLPRCYLLMRQPGLNTPEFFLGGGPGDAQGQNDGNTGNQGKHE

SEQ ID NO: 87 - DNA, 22 bp, Homo sapiens
agatcaacaacaagtcggatct

SEQ ID NO: 88 - DNA, 22 bp, Homo sapiens
tactgcgtgtagttgcagtagg

SEQ ID NO: 89 - DNA, 20 bp, Homo sapiens
gacaaccatgtacgccctct

SEQ ID NO: 90 - DNA, 20 bp, Homo sapiens
agcaccttcttccggttctt

SEQ ID NO: 91 - DNA, 20 bp, Homo sapiens
tcagtgaggatgacgtcgag

SEQ ID NO: 92 - DNA, 20 bp, Homo sapiens
gcaggaagaaaagccagatg

SEQ ID NO: 93 - DNA, 20 bp, Homo sapiens
taaacgaaaagggatgcagg

SEQ ID NO: 94 - DNA, 20 bp, Homo sapiens
tgtaagaaccgttgctgtgc

SEQ ID NO: 95 - DNA, 20 bp, Homo sapiens
aaatcatccgggggattaag

SEQ ID NO: 96 - DNA, 20 bp, Homo sapiens
gtgtgcaaatgacaacctgg

SEQ ID NO: 97 - DNA, 20 bp, Bacteriophage T7
taatacgactcactataggg

SEQ ID NO: 98 - DNA, 18 bp, Bacteriophage SP6
atttaggtgacactatag

SEQ ID NO: 99 - DNA, 77 bp, Homo sapiens
tgccttggccaggaacatgaggctgggcttcatggccaccacaggctccgagcacgtatcaaagaggtcgtagccca

SEQ ID NO: 100 - DNA, 80 bp, Homo sapiens
tatcaccgtccacggctacttcctcatcaccttcctctttggcatggtggtcctggccctggtggtctggaagatcttca

SEQ ID NO: 101 - DNA, 80 bp, Homo sapiens
cccacccagtcgtcgtaacagcaacagcaaccctcctctgcccaggtgctaccagtgcaaagctgctaaagtgatcttca

SEQ ID NO: 102 - DNA, 80 bp, Homo sapiens
tgacaagagaacaaaacatatctgtgtctactgggagggatcagagggaggccgctggtccacggagggctgctctcatg

SEQ ID NO: 103 - DNA, 80 bp, Homo sapiens
gccagcacgagctttttcattggagaaccacaagacttcacatgtaaaaccaggcagacaatgtttggagtgagctttac

SEQ ID NO: 104 - protein, 13 aa, Homo sapiens
ELAMVTGKFFSFF

SEQ ID NO: 105 - protein, 13 aa, Homo sapiens
SMELLSARETFPS

SEQ ID NO: 106 - protein, 13 aa, Homo sapiens
FRTVPSDRVQLTA

SEQ ID NO: 107 - protein, 13 aa, Homo sapiens
FNYSISSRLSPKV

SEQ ID NO: 108 - protein, 13 aa, Homo sapiens
ISSRLSPKVWVAS

SEQ ID NO: 109 - protein, 13 aa, Homo sapiens
GRFNGSLRTERLK

SEQ ID NO: 110 - protein, 13 aa, Homo sapiens
NGSLRTERLKIRW

SEQ ID NO: 111 - protein, 13 aa, Homo sapiens
DCEAGSYRQNPDD

SEQ ID NO: 112 - protein, 13 aa, Homo sapiens
WSPERSTRCFRRR

SEQ ID NO: 113 - protein, 14 aa, Homo sapiens
YDLFDTCSEPVVAM

SEQ ID NO: 114 - protein, 14 aa, Homo sapiens
SMELLSARETFPSF

SEQ ID NO: 115 - protein, 14 aa, Homo sapiens
VAALGSDDEYGRQG

SEQ ID NO: 116 - protein, 14 aa, Homo sapiens
SELPLSWADRLSGC

SEQ ID NO: 117 - protein, 14 aa, Homo sapiens
STRCFRRRSRFLAW

SEQ ID NO: 118 - protein, 14 aa, Homo sapiens
VEEINNKSDLLPGL

SEQ ID NO: 119 - protein, 14 aa, Homo sapiens
IAAYCNYTQYQPRV

SEQ ID NO: 120 - protein, 14 aa, Homo sapiens
VLHQVNQSSVQVVL

SEQ ID NO: 121 - protein, 14 aa, Homo sapiens
AHALFNYSISSRLS

SEQ ID NO: 122 - protein, 14 aa, Homo sapiens
CITLQNVSAGLNHH

SEQ ID NO: 123 - protein, 14 aa, Homo sapiens
NTLQCNASGCPAQD

SEQ ID NO: 124 - protein, 14 aa, Homo sapiens
LENMYNLTFHVGGL

SEQ ID NO: 125 - protein, 14 aa, Homo sapiens
DVGRFNGSLRTERL

SEQ ID NO: 126 - protein, 14 aa, Homo sapiens
LAHATNATLAFLCF

SEQ ID NO: 127 - protein, 16 aa, Homo sapiens
LHPGTGAPLCLSQQLR

SEQ ID NO: 128 - protein, 16 aa, Homo sapiens
RFSSNGLLWALAMKMA

SEQ ID NO: 129 - protein, 16 aa, Homo sapiens
SDLLPGLRLGYDLFDT

SEQ ID NO: 130 - protein, 16 aa, Homo sapiens
LAAARGICIAHEGLVP

SEQ ID NO: 131 - protein, 16 aa, Homo sapiens
GMAQMGTVLGFLQRGA

SEQ ID NO: 132 - protein, 16 aa, Homo sapiens
VGRFNGSLRTERLKIR

SEQ ID NO: 133 - protein, 16 aa, Homo sapiens
LSLALGLVLAALGLFV

SEQ ID NO: 134 - protein, 16 aa, Homo sapiens
LVQASGGPLACFGLVC

SEQ ID NO: 135 - protein, 16 aa, Homo sapiens
HLPLTGCLSTLFLQAA

SEQ ID NO: 136 - protein, 16 aa, Homo sapiens
SWVSFGLAHATNATLA

SEQ ID NO: 137 - protein, 16 aa, Homo sapiens
YNRARGLTFAMLAYFI

SEQ ID NO: 138 - protein, 16 aa, Homo sapiens
LLCVLGILAAFHLPRC

SEQ ID NO: 139 - protein, 16 aa, Homo sapiens
PEFFLGGGPGDAQGQN

SEQ ID NO: 140 - protein, 16 aa, Homo sapiens
PGDAQGQNDGNTGNQG

SEQ ID NO: 141 - protein, 15 aa, Homo sapiens
QGQNDGNTGNQGKHE

SEQ ID NO: 142 - protein, 35 aa, Homo sapiens
KGFHSCCYDCVDCEAGSYRQNPDDIACTFCGQDEW

SEQ ID NO: 143 - protein, 13 aa, Homo sapiens
ELAMVTGKFFSFF

SEQ ID NO: 144 - protein, 13 aa, Homo sapiens
SMELLSARETFPS

SEQ ID NO: 145 - protein, 13 aa, Homo sapiens
FRTVPSDRVQLTA

SEQ ID NO: 146 - protein, 13 aa, Homo sapiens
FNYSISSRLSPKV

SEQ ID NO: 147 - protein, 13 aa, Homo sapiens
ISSRLSPKVWVAS

SEQ ID NO: 148 - protein, 13 aa, Homo sapiens
GRFNGSLRTERLK

SEQ ID NO: 149 - protein, 13 aa, Homo sapiens
NGSLRTERLKIRW

SEQ ID NO: 150 - protein, 13 aa, Homo sapiens
DCEAGSYRQNPDD

SEQ ID NO: 151 - protein, 13 aa, Homo sapiens
WSPERSTRCFRRR

SEQ ID NO: 152 - protein, 14 aa, Homo sapiens
YDLFDTCSEPVVAM

SEQ ID NO: 153 - protein, 14 aa, Homo sapiens
SMELLSARETFPSF

SEQ ID NO: 154 - protein, 14 aa, Homo sapiens
VAALGSDDEYGRQG

SEQ ID NO: 155 - protein, 14 aa, Homo sapiens
STRCFRRRSRFLAW

SEQ ID NO: 156 - protein, 14 aa, Homo sapiens
VEEINNKSDLLPGL

SEQ ID NO: 157 - protein, 14 aa, Homo sapiens
IAAYCNYTQYQPRV

SEQ ID NO: 158 - protein, 14 aa, Homo sapiens
VLHQVNQSSVQVVL

SEQ ID NO: 159 - protein, 14 aa, Homo sapiens
AHALFNYSISSRLS

SEQ ID NO: 160 - protein, 14 aa, Homo sapiens
CITLQNVSAGLNHH

SEQ ID NO: 161 - protein, 14 aa, Homo sapiens
NTLQCNASGCPAQD

SEQ ID NO: 162 - protein, 14 aa, Homo sapiens
LENMYNLTFHVGGL

SEQ ID NO: 163 - protein, 14 aa, Homo sapiens
DVGRFNGSLRTERL

SEQ ID NO: 164 - protein, 14 aa, Homo sapiens
LAHATNATLAFLCF

SEQ ID NO: 165 - protein, 16 aa, Homo sapiens
LHPGTGAPLCLSQQLR

SEQ ID NO: 166 - protein, 16 aa, Homo sapiens
RFSSNGLLWALAMKMA

SEQ ID NO: 167 - protein, 16 aa, Homo sapiens
SDLLPGLRLGYDLFDT

SEQ ID NO: 168 - protein, 16 aa, Homo sapiens
LAAARGICIAHEGLVP

SEQ ID NO: 169 - protein, 16 aa, Homo sapiens
GMAQMGTVLGFLQRGA

SEQ ID NO: 170 - protein, 16 aa, Homo sapiens
VGRFNGSLRTERLKIR

SEQ ID NO: 171 - protein, 16 aa, Homo sapiens
LSLALGLVLAALGLFV

SEQ ID NO: 172 - protein, 16 aa, Homo sapiens
LVQASGGPLACFGLVC

SEQ ID NO: 173 - protein, 16 aa, Homo sapiens
HLPLTGCLSTLFLRGP

SEQ ID NO: 174 - protein, 16 aa, Homo sapiens
SWVSFGLAHATNATLA

SEQ ID NO: 175 - protein, 16 aa, Homo sapiens
YNRARGLTFAMLAYFI

SEQ ID NO: 176 - protein, 16 aa, Homo sapiens
LLCVLGILAAFHLPRC

SEQ ID NO: 177 - protein, 16 aa, Homo sapiens
PEFFLGGGPGDAQGQN

SEQ ID NO: 178 - protein, 16 aa, Homo sapiens
PGDAQGQNDGNTGNQG

SEQ ID NO: 179 - protein, 15 aa, Homo sapiens
QGQNDGNTGNQGKHE

SEQ ID NO: 180 - protein, 35 aa, Homo sapiens; identical to SEQ ID NO: 142

SEQ ID NO: 181 - protein, 13 aa, Homo sapiens
SMELLSARETFPS

SEQ ID NO: 182 - protein, 13 aa, Homo sapiens
FRTVPSDRVQLTA

SEQ ID NO: 183 - protein, 13 aa, Homo sapiens
FNYSISSRLSPKV

SEQ ID NO: 184 - protein, 13 aa, Homo sapiens
ISSRLSPKVWVAS

SEQ ID NO: 185 - protein, 13 aa, Homo sapiens
GRFNGSLRTERLK

SEQ ID NO: 186 - protein, 13 aa, Homo sapiens
NGSLRTERLKIRW

SEQ ID NO: 187 - protein, 13 aa, Homo sapiens
DCEAGSYRQNPGE

SEQ ID NO: 188 - protein, 13 aa, Homo sapiens
WSPERSTRCFRRR

SEQ ID NO: 189 - protein, 14 aa, Homo sapiens
YDLFDTCSEPVVAM

SEQ ID NO: 190 - protein, 14 aa, Homo sapiens
SMELLSARETFPSF

SEQ ID NO: 191 - protein, 14 aa, Homo sapiens
VAALGSDDEYGRQG

SEQ ID NO: 192 - protein, 14 aa, Homo sapiens
PAPFSSLTDDIACT

SEQ ID NO: 193 - protein, 14 aa, Homo sapiens
SELPLSWADRLSGC

SEQ ID NO: 194 - protein, 14 aa, Homo sapiens
STRCFRRRSRFLAW

SEQ ID NO: 195 - protein, 14 aa, Homo sapiens
VEEINNKSDLLPGL

SEQ ID NO: 196 - protein, 14 aa, Homo sapiens
IAAYCNYTQYQPRV

SEQ ID NO: 197 - protein, 14 aa, Homo sapiens
VLHQVNQSSVQVVL

SEQ ID NO: 198 - protein, 14 aa, Homo sapiens
AHALFNYSISSRLS

SEQ ID NO: 199 - protein, 14 aa, Homo sapiens
CITLQNVSAGLNHH

SEQ ID NO: 200 - protein, 14 aa, Homo sapiens
NTLQCNASGCPAQD

SEQ ID NO: 201 - protein, 14 aa, Homo sapiens
LENMYNLTFHVGGL

SEQ ID NO: 202 - protein, 14 aa, Homo sapiens
DVGRFNGSLRTERL

SEQ ID NO: 203 - protein, 14 aa, Homo sapiens
LAHATNATLAFLCF

SEQ ID NO: 204 - protein, 16 aa, Homo sapiens
LHPGTGAPLCLSQQLR

SEQ ID NO: 205 - protein, 16 aa, Homo sapiens
RFSSNGLLWALAMKMA

SEQ ID NO: 206 - protein, 16 aa, Homo sapiens
SDLLPGLRLGYDLFDT

SEQ ID NO: 207 - protein, 16 aa, Homo sapiens
LAAARGICIAHEGLVP

SEQ ID NO: 208 - protein, 16 aa, Homo sapiens
GMAQMGTVLGFLQRGA

SEQ ID NO: 209 - protein, 16 aa, Homo sapiens
VGRFNGSLRTERLKIR

SEQ ID NO: 210 - protein, 16 aa, Homo sapiens
RQAGVGTQQGRVLPSP

SEQ ID NO: 211 - protein, 16 aa, Homo sapiens
LSLALGLVLAALGLFV

SEQ ID NO: 212 - protein, 16 aa, Homo sapiens
LVQASGGPLACFGLVC

SEQ ID NO: 213 - protein, 16 aa, Homo sapiens
HLPLTGCLSTLFLQAA

SEQ ID NO: 214 - protein, 16 aa, Homo sapiens
SWVSFGLAHATNATLA

SEQ ID NO: 215 - protein, 16 aa, Homo sapiens
YNRARGLTFAMLAYFI

SEQ ID NO: 216 - protein, 16 aa, Homo sapiens
LLCVLGILAAFHLPRC

SEQ ID NO: 217 - protein, 16 aa, Homo sapiens
PEFFLGGGPGDAQGQN

SEQ ID NO: 218 - protein, 16 aa, Homo sapiens
PGDAQGQNDGNTGNQG

SEQ ID NO: 219 - protein, 15 aa, Homo sapiens
QGQNDGNTGNQGKHE

SEQ ID NO: 220 - protein, 17 aa, Homo sapiens
GVSMIFLAFTIILYAFL

SEQ ID NO: 221 - protein, 20 aa, Homo sapiens
IHVALGGSLFLLNLAFLVNV

SEQ ID NO: 222 - protein, 22 aa, Homo sapiens
AVFHYFLLCAFTWMGLEAFHLY

SEQ ID NO: 223 - protein, 25 aa, Homo sapiens
LVGWGLPALMVIGTGSANSYGLYTI

SEQ ID NO: 224 - protein, 19 aa, Homo sapiens
GYFLITFLFGMVVLALVVW

SEQ ID NO: 225 - protein, 22 aa, Homo sapiens
LVGVTWGLAIFTPLGLSTVYIF

SEQ ID NO: 226 - protein, 22 aa, Homo sapiens
LFNSLQGVFICCWFTILYLPSQ

SEQ ID NO: 227 - protein, 14 aa, Homo sapiens
RLSRERFKSEDAPK

SEQ ID NO: 228 - protein, 15 aa, Homo sapiens
GSGSKGSDAACWARG

SEQ ID NO: 229 - protein, 19 aa, Homo sapiens
LLAVRVFNTYFGHYFLKLS

SEQ ID NO: 230 - protein, 28 aa, Homo sapiens
RDRENRTSLELCWFREGTTMYALYITVH

SEQ ID NO: 231 - protein, 29 aa, Homo sapiens
KIFTLSRATAVKERGKNRKKVLTLLGLSS

SEQ ID NO: 232 - protein, 13 aa, Homo sapiens
SYGLYTIRDRENR

SEQ ID NO: 233 - protein, 13 aa, Homo sapiens
TVSSSTARLDQAH

SEQ ID NO: 234 - protein, 14 aa, Homo sapiens
DVTKGTTGDWSSEG

SEQ ID NO: 235 - protein, 14 aa, Homo sapiens
SYGLYTIRDRENRT

SEQ ID NO: 236 - protein, 14 aa, Homo sapiens
DRENRTSLELCWFR

SEQ ID NO: 237 - protein, 14 aa, Homo sapiens
QRPPPNMTLTCVFW

SEQ ID NO: 238 - protein, 14 aa, Homo sapiens
IRDRENRTSLELCW

SEQ ID NO: 239 - protein, 16 aa, Homo sapiens
QGPRLGLGDGSGVLNN

SEQ ID NO: 240 - protein, 16 aa, Homo sapiens
LGDGSGVLNNRLVGLS

SEQ ID NO: 241 - protein, 16 aa, Homo sapiens
NNRLVGLSVGQMHVTK

SEQ ID NO: 242 - protein, 16 aa, Homo sapiens
EVRPEGTVCCCDHLTF

SEQ ID NO: 243 - protein, 16 aa, Homo sapiens
RISQAGCGVSMIFLAF

SEQ ID NO: 244 - protein, 16 aa, Homo sapiens
VNVGSGSKGSDAACWA

SEQ ID NO: 245 - protein, 16 aa, Homo sapiens
GSGSKGSDAACWARGA

SEQ ID NO: 246 - protein, 16 aa, Homo sapiens
ALMVIGTGSANSYGLY

SEQ ID NO: 247 - protein, 16 aa, Homo sapiens
MVIGTGSANSYGLYTI

SEQ ID NO: 248 - protein, 16 aa, Homo sapiens
LSSLVGVTWGLAIFTP

SEQ ID NO: 249 - protein, 16 aa, Homo sapiens
FNSLQGVFICCWFTIL

SEQ ID NO: 250 - protein, 17 aa, Homo sapiens
GVSMIFLAFTIILYAFL

SEQ ID NO: 251 - protein, 20 aa, Homo sapiens
IHVALGGSLFLLNLAFLVNV

SEQ ID NO: 252 - protein, 22 aa, Homo sapiens
AVFHYFLLCAFTWMGLEAFHLY

SEQ ID NO: 253 - protein, 25 aa, Homo sapiens
LVGWGLPALMVIGTGSANSYGLYTI

SEQ ID NO: 254 - protein, 19 aa, Homo sapiens
GYFLITFLFGMVVLALVVW

SEQ ID NO: 255 - protein, 22 aa, Homo sapiens
LVGVTWGLAIFTPLGLSTVYIF

SEQ ID NO: 256 - protein, 22 aa, Homo sapiens
LFNSLQGVFICCWFTILYLPSQ

SEQ ID NO: 257 - protein, 14 aa, Homo sapiens
RLSRERFKSEDAPK

SEQ ID NO: 258 - protein, 15 aa, Homo sapiens
GSGSKGSDAACWARG

SEQ ID NO: 259 - protein, 19 aa, Homo sapiens
LLAVRVFNTYFGHYFLKLS

SEQ ID NO: 260 - protein, 28 aa, Homo sapiens
RDRENRTSLELCWFREGTTMYALYITVH

SEQ ID NO: 261 - protein, 29 aa, Homo sapiens
KIFTLSRATAVKERGKNRKKVLTLLGLSS

SEQ ID NO: 262 - protein, 10 aa, Homo sapiens
MATPRGLGAL

SEQ ID NO: 263 - protein, 13 aa, Homo sapiens
MKEGLTQKVNTPF

SEQ ID NO: 264 - protein, 13 aa, Homo sapiens
SYGLYTIRDRENR

SEQ ID NO: 265 - protein, 13 aa, Homo sapiens
TVSSSTARLDQAH

SEQ ID NO: 266 - protein, 14 aa, Homo sapiens
LLLPTSGQEKPTEG

SEQ ID NO: 267 - protein, 14 aa, Homo sapiens
TKCRQSGSDSCNVE

SEQ ID NO: 268 - protein, 14 aa, Homo sapiens
NLSTNTAEDFYFSL

SEQ ID NO: 269 - protein, 14 aa, Homo sapiens
VRLAVTILDIGPGT

SEQ ID NO: 270 - protein, 14 aa, Homo sapiens
DVTKGTTGDWSSEG

SEQ ID NO: 271 - protein, 14 aa, Homo sapiens
SYGLYTIRDRENRT

SEQ ID NO: 272 - protein, 14 aa, Homo sapiens
DRENRTSLELCWFR

SEQ ID NO: 273 - protein, 14 aa, Homo sapiens
KALVQNLSTNTAED

SEQ ID NO: 274 - protein, 14 aa, Homo sapiens
RSLPGNRSVVRLAV

SEQ ID NO: 275 - protein, 14 aa, Homo sapiens
QRPPPNMTLTCVFW

SEQ ID NO: 276 - protein, 14 aa, Homo sapiens
IRDRENRTSLELCW

SEQ ID NO: 277 - protein, 16 aa, Homo sapiens
KCRQSGSDSCNVENLQ

SEQ ID NO: 278 - protein, 16 aa, Homo sapiens
KGPRLGLGDGSGVLNN

SEQ ID NO: 279 - protein, 16 aa, Homo sapiens
LGDGSGVLNNRLVGLS

SEQ ID NO: 280 - protein, 16 aa, Homo sapiens
NNRLVGLSVGQMHVTK

SEQ ID NO: 281 - protein, 16 aa, Homo sapiens
EVRPEGTVCCCDHLTF

SEQ ID NO: 282 - protein, 16 aa, Homo sapiens
RISQAGCGVSMIFLAF

SEQ ID NO: 283 - protein, 16 aa, Homo sapiens
VNVGSGSKGSDAACWA

SEQ ID NO: 284 - protein, 16 aa, Homo sapiens
GSGSKGSDAACWARGA

SEQ ID NO: 285 - protein, 16 aa, Homo sapiens
ALMVIGTGSANSYGLY

SEQ ID NO: 286 - protein, 16 aa, Homo sapiens
MVIGTGSANSYGLYTI

SEQ ID NO: 287 - protein, 16 aa, Homo sapiens
LSSLVGVTWGLAIFTP

SEQ ID NO: 288 - protein, 16 aa, Homo sapiens
FNSLQGVFICCWFTIL

SEQ ID NO: 289 - protein, 10 aa, Homo sapiens
MATPRGLGAL

SEQ ID NO: 290 - protein, 13 aa, Homo sapiens
MKEGLTQKVNTPF

SEQ ID NO: 291 - protein, 13 aa, Homo sapiens
SYGLYTIRDRENR

SEQ ID NO: 292 - protein, 13 aa, Homo sapiens
TVSSSTARLDQAH

SEQ ID NO: 293 - protein, 14 aa, Homo sapiens
LLLPTSGQEKPTEG

SEQ ID NO: 294 - protein, 14 aa, Homo sapiens
TKCRQSGSDSCNVE

SEQ ID NO: 295 - protein, 14 aa, Homo sapiens
NLSTNTAEDFYFSL

SEQ ID NO: 296 - protein, 14 aa, Homo sapiens
VRLAVTILDIGPGT

SEQ ID NO: 297 - protein, 14 aa, Homo sapiens
DVTKGTTGDWSSEG

SEQ ID NO: 298 - protein, 14 aa, Homo sapiens
SYGLYTIRDRENRT

SEQ ID NO: 299 - protein, 14 aa, Homo sapiens
DRENRTSLELCWFR

SEQ ID NO: 300 - protein, 14 aa, Homo sapiens
KALVQNLSTNTAED

SEQ ID NO: 301 - protein, 14 aa, Homo sapiens
RSLPGNRSVVRLAV

SEQ ID NO: 302 - protein, 14 aa, Homo sapiens
QRPPPNMTLTCVFW

SEQ ID NO: 303 - protein, 14 aa, Homo sapiens
IRDRENRTSLELCW

SEQ ID NO: 304 - protein, 16 aa, Homo sapiens
KCRQSGSDSCNVENLQ

SEQ ID NO: 305 - protein, 16 aa, Homo sapiens
KGPRLGLGDGSGVLNN

SEQ ID NO: 306 - protein, 16 aa, Homo sapiens
LGDGSGVLNNRLVGLS

SEQ ID NO: 307 - protein, 16 aa, Homo sapiens
NNRLVGLSVGQMHVTK

SEQ ID NO: 308 - protein, 16 aa, Homo sapiens
EVRPEGTVCCCDHLTF

SEQ ID NO: 309 - protein, 16 aa, Homo sapiens
RISQAGCGVSMIFLAF

SEQ ID NO: 310 - protein, 16 aa, Homo sapiens
RLMVIGTGSANSYGLY

SEQ ID NO: 311 - protein, 16 aa, Homo sapiens
MVIGTGSANSYGLYTI

SEQ ID NO: 312 - protein, 16 aa, Homo sapiens
LSSLVGVTWGLAIFTP

SEQ ID NO: 313 - protein, 16 aa, Homo sapiens
FNSLQGVFICCWFTIL

SEQ ID NO: 314 - protein, 20 aa, Homo sapiens
VLVIFLAASFVGNIVLALVL

SEQ ID NO: 315 - protein, 27 aa, Homo sapiens
IFNLLVTDLLQISLVAPWVVATSVPLF

SEQ ID NO: 316 - protein, 26 aa, Homo sapiens
HFCTALVSLTHLFAFASVNTIVVVSV

SEQ ID NO: 317 - protein, 23 aa, Homo sapiens
GYLLLYGTWIVAILQSTPPLYGW

SEQ ID NO: 318 - protein, 23 aa, Homo sapiens
ILSVVSFIVIPLIVMIACYSVVF

SEQ ID NO: 319 - protein, 19 aa, Homo sapiens
VIFIIIFSYVLSLGPYCFL

SEQ ID NO: 320 - protein, 20 aa, Homo sapiens
WVITIIIWLFFLQCCIHPYV

SEQ ID NO: 321 - protein, 13 aa, Homo sapiens
QRKPQLLQVTNRF

SEQ ID NO: 322 - protein, 5 aa, Homo sapiens
WPLNS

SEQ ID NO: 323 - protein, 20 aa, Homo sapiens
DRYLSIIHPLSYPSKMTQRR

SEQ ID NO: 324 - protein, 23 aa, Homo sapiens
GQAAFDERNALCSMIWGASPSYT

SEQ ID NO: 325 - protein, 183 aa, Homo sapiens
CAARRQHALLYNVKRHSLEVRVKDCVENEDEEGAEKKEEFQDESEFRRQHEGEVKAKEGRMEAKDGSLKAKEGSTGTSESSVEARGSEEVRESSTVASDGSMEGKEGSTKVEENSMKADKGRTEVNQCSIDLGEDDMEFGEDDINFSEDDVEAVNIPESLPPSRRNSNSNPPLPRCYQCKAAK

SEQ ID NO: 326 - protein, 15 aa, Homo sapiens
AVLAVWVDVETQVPQ

SEQ ID NO: 327 - protein, 13 aa, Homo sapiens
STCTNSTRESNSS

SEQ ID NO: 328 - protein, 13 aa, Homo sapiens
QLLQVTNRFIFNL

SEQ ID NO: 329 - protein, 13 aa, Homo sapiens
YPSKMTQRRGYLL

SEQ ID NO: 330 - protein, 13 aa, Homo sapiens
EAKDGSLKAKEGS

SEQ ID NO: 331 - protein, 13 aa, Homo sapiens
EGKEGSTKVEENS

SEQ ID NO: 332 - protein, 13 aa, Homo sapiens
KVEENSMKADKGR

SEQ ID NO: 333 - protein, 13 aa, Homo sapiens
ESLPPSRRNSNSN

SEQ ID NO: 334 - protein, 13 aa, Homo sapiens
GYMHKTIKKEIQD

SEQ ID NO: 335 - protein, 14 aa, Homo sapiens
STCTNSTRESNSSH

SEQ ID NO: 336 - protein, 14 aa, Homo sapiens
TGTSESSVEARGSE

SEQ ID NO: 337 - protein, 14 aa, Homo sapiens
GKEGSTKVEENSMK

SEQ ID NO: 338 - protein, 14 aa, Homo sapiens
DDINFSEDDVEAVN

SEQ ID NO: 339 - protein, 14 aa, Homo sapiens
PPKEDSHPDLPGTE

SEQ ID NO: 340 - protein, 14 aa, Homo sapiens
LLYNVKRHSLEVRV

SEQ ID NO: 341 - protein, 14 aa, Homo sapiens
SLPPSRRNSNSNPP

SEQ ID NO: 342 - protein, 14 aa, Homo sapiens
TSTCTNSTRESNSS

SEQ ID NO: 343 - protein, 14 aa, Homo sapiens
STRESNSSHTCMPL

SEQ ID NO: 344 - protein, 14 aa, Homo sapiens
GEDDINFSEDDVEA

SEQ ID NO: 345 - protein, 16 aa, Homo sapiens
ISLAHGIIRSTVLVIF

SEQ ID NO: 346 - protein, 16 aa, Homo sapiens
CSMIWGASPSYTILSV

SEQ ID NO: 347 - protein, 16 aa, Homo sapiens
MEAKDGSLKAKEGSTG

SEQ ID NO: 348 - protein, 16 aa, Homo sapiens
LKAKEGSTGTSESSVE

SEQ ID NO: 349 - protein, 16 aa, Homo sapiens
KEGSTGTSESSVEARG

SEQ ID NO: 350 - protein, 16 aa, Homo sapiens
TVASDGSMEGKEGSTK

SEQ ID NO: 351 - protein, 16 aa, Homo sapiens
HPDLPGTEGGTEGKIV

SEQ ID NO: 352 - protein, 16 aa, Homo sapiens
LPGTEGGTEGKIVPSY

SEQ ID NO: 353 - protein, 27 aa, Homo sapiens
HLFAFASVNTIVVVSVDRYLSIIHPLS

SEQ ID NO: 354 - protein, 20 aa, Homo sapiens
VLVIFLAASFVGNIVLALVL

SEQ ID NO: 355 - protein, 27 aa, Homo sapiens
IFNLLVTDLLQISLVAPWVVATSVPLF

SEQ ID NO: 356 - protein, 26 aa, Homo sapiens
HFCTALVSLTHLFAFASVNTIVVVSV

SEQ ID NO: 357 - protein, 23 aa, Homo sapiens
GYLLLYGTWIVAILQSTPPLYGW

SEQ ID NO: 358 - protein, 23 aa, Homo sapiens
ILSVVSFIVIPLIVMIACYSVVF

SEQ ID NO: 359 - protein, 19 aa, Homo sapiens
VIFIIIFSYVLSLGPYCFL

SEQ ID NO: 360 - protein, 20 aa, Homo sapiens
WVITIIIWLFFLQCCIHPYV

SEQ ID NO: 361 - protein, 13 aa, Homo sapiens
QRKPQLLQVTNRF

SEQ ID NO: 362 - protein, 5 aa, Homo sapiens
WPLNS

SEQ ID NO: 363 - protein, 20 aa, Homo sapiens
DRYLSIIHPLSYPSKMTQRR

SEQ ID NO: 364 - protein, 23 aa, Homo sapiens
GQAAFDERNALCSMIWGASPSYT

SEQ ID NO: 365 - protein, 183 aa, Homo sapiens; identical to SEQ ID NO: 325

SEQ ID NO: 366 - protein, 15 aa, Homo sapiens
AVLAVWVDVETQVPQ

SEQ ID NO: 367 - protein, 13 aa, Homo sapiens
STCTNSTRESNSS

SEQ ID NO: 368 - protein, 13 aa, Homo sapiens
QLLQVTNRFIFNL

SEQ ID NO: 369 - protein, 13 aa, Homo sapiens
YPSKMTQRRGYLL

SEQ ID NO: 370 - protein, 13 aa, Homo sapiens
ESLPPSRRNSNSN

SEQ ID NO: 371 - protein, 13 aa, Homo sapiens
GYMHKTIKKEIQD

SEQ ID NO: 372 - protein, 14 aa, Homo sapiens
STCTNSTRESNSSH

SEQ ID NO: 373 - protein, 14 aa, Homo sapiens
PPKEDSHPDLPGTE

SEQ ID NO: 374 - protein, 14 aa, Homo sapiens
LLYNVKRHSLEVRV

SEQ ID NO: 375 - protein, 14 aa, Homo sapiens
SLPPSRRNSNSNPP

SEQ ID NO: 376 - protein, 14 aa, Homo sapiens
TSTCTNSTRESNSS

SEQ ID NO: 377 - protein, 14 aa, Homo sapiens
STRESNSSHTCMPL

SEQ ID NO: 378 - protein, 16 aa, Homo sapiens
ISLAHGIIRSTVLVIF

SEQ ID NO: 379 - protein, 16 aa, Homo sapiens
CSMIWGASPSYTILSV

SEQ ID NO: 380 - protein, 16 aa, Homo sapiens
HPDLPGTEGGTEGKIV

SEQ ID NO: 381 - protein, 16 aa, Homo sapiens
LPGTEGGTEGKIVPSY

SEQ ID NO: 382 - protein, 27 aa, Homo sapiens
HLFAFASVNTIVVVSVDRYLSIIHPLS

SEQ ID NO: 383 - protein, 20 aa, Homo sapiens
VGLTISLLCLFLAILTFLLC

SEQ ID NO: 384 - protein, 19 aa, Homo sapiens
LELSLCLFLAHLLFLTGIN

SEQ ID NO: 385 - protein, 19 aa, Homo sapiens
VLCSIIAGLLHFLYLACFT

SEQ ID NO: 386 - protein, 22 aa, Homo sapiens
FMYPVGYGIPAVIIAVSAIVGP

SEQ ID NO: 387 - protein, 28 aa, Homo sapiens
GFIWSFMGPVAVIILINLVFYFQVLWIL

SEQ ID NO: 388 - protein, 19 aa, Homo sapiens
AISQLFILGCSWGLGFFMV

SEQ ID NO: 389 - protein, 23 aa, Homo sapiens
IGSIIAYSFTIINTLQGVLLFVV

SEQ ID NO: 390 - protein, 11 aa, Homo sapiens
RPIQNTSTSLH

SEQ ID NO: 391 - protein, 5 aa, Homo sapiens
RTEPE

SEQ ID NO: 392 - protein, 30 aa, Homo sapiens
WMLLEGLHLFLTVRNLKVANYTSTGRFKKR

SEQ ID NO: 393 - protein, 15 aa, Homo sapiens
QNYGTFTHCWLKLDK

SEQ ID NO: 394 - protein, 23 aa, Homo sapiens
RSKLSSLNKEVSTIQDTRVMTFK

SEQ ID NO: 395 - protein, 6 aa, Homo sapiens
EEVGKT

SEQ ID NO: 396 - protein, 13 aa, Homo sapiens
EPVFLTFRHNQPG

SEQ ID NO: 397 - protein, 13 aa, Homo sapiens
LHLFLTVRNLKVA

SEQ ID NO: 398 - protein, 13 aa, Homo sapiens
ANYTSTGRFKKRF

SEQ ID NO: 399 - protein, 13 aa, Homo sapiens
DTRVMTFKAISQL

SEQ ID NO: 400 - protein, 14 aa, Homo sapiens
LKEKISLSEPVFLT

SEQ ID NO: 401 - protein, 14 aa, Homo sapiens
TGINRTEPEVLCSI

SEQ ID NO: 402 - protein, 14 aa, Homo sapiens
NKEVSTIQDTRVMT

SEQ ID NO: 403 - protein, 14 aa, Homo sapiens
SHVHSNGSYTKCKC

SEQ ID NO: 404 - protein, 14 aa, Homo sapiens
CRPIQNTSTSLHLE

SEQ ID NO: 405 - protein, 14 aa, Homo sapiens
FLTGINRTEPEVLC

SEQ ID NO: 406 - protein, 14 aa, Homo sapiens
NLKVANYTSTGRFK

SEQ ID NO: 407 - protein, 16 aa, Homo sapiens
CVYWEGSEGGRWSTEG

SEQ ID NO: 408 - protein, 16 aa, Homo sapiens
WEGSEGGRWSTEGCSH

SEQ ID NO: 409 - protein, 16 aa, Homo sapiens
VITQVGLTISLLCLFL

SEQ ID NO: 410 - protein, 16 aa, Homo sapiens
LLFLTGINRTEPEVLC

SEQ ID NO: 411 - protein, 16 aa, Homo sapiens
QLFILGCSWGLGFFMV

SEQ ID NO: 412 - protein, 16 aa, Homo sapiens
VGKTIGSIIAYSFTII

SEQ ID NO: 413 - protein, 16 aa, Homo sapiens
KKWFSGMRKGVETEST

SEQ ID NO: 414 - protein, 13 aa, Homo sapiens
LSSEDSPRRPQIQ

SEQ ID NO: 415 - protein, 13 aa, Homo sapiens
VAMAATLRFLSKF

SEQ ID NO: 416 - protein, 13 aa, Homo sapiens
TAEILSDKIRFPS

SEQ ID NO: 417 - protein, 13 aa, Homo sapiens
VRINRTLKKIILE

SEQ ID NO: 418 - protein, 13 aa, Homo sapiens
LLPSDSHKLLHEY

SEQ ID NO: 419 - protein, 13 aa, Homo sapiens
CIFNHSQRTLAYK

SEQ ID NO: 420 - protein, 13 aa, Homo sapiens
GQMKKTTRSQHIC

SEQ ID NO: 421 - protein, 13 aa, Homo sapiens
EPQDFTCKTRQTM

SEQ ID NO: 422 - protein, 13 aa, Homo sapiens
CILTKSLKILLAF

SEQ ID NO: 423 - protein, 13 aa, Homo sapiens
TNPSSSGKSATWQ

SEQ ID NO: 424 - protein, 14 aa, Homo sapiens
SQPCQTPDDFVAAT

SEQ ID NO: 425 - protein, 14 aa, Homo sapiens
HEKMLSSEDSPRRP

SEQ ID NO: 426 - protein, 14 aa, Homo sapiens
YEIYDTCTEVTVAM

SEQ ID NO: 427 - protein, 14 aa, Homo sapiens
QVGYESTAEILSDK

SEQ ID NO: 428 - protein, 14 aa, Homo sapiens
WIGIITTDDDYGRL

SEQ ID NO: 429 - protein, 14 aa, Homo sapiens
IGIITTDDDYGRLA

SEQ ID NO: 430 - protein, 14 aa, Homo sapiens
VLKNVTFTDGWNSF

SEQ ID NO: 431 - protein, 14 aa, Homo sapiens
HGDLNTGYDVVLWK

SEQ ID NO: 432 - protein, 14 aa, Homo sapiens
IPDQETKNEFRNLK

SEQ ID NO: 433 - protein, 14 aa, Homo sapiens
SPGQMKKTTRSQHI

SEQ ID NO: 434 - protein, 11 aa, Homo sapiens
KTLPRKRMSSI

SEQ ID NO: 435 - protein, 14 aa, Homo sapiens
SIEMINNSTLLPGV

SEQ ID NO: 436 - protein, 14 aa, Homo sapiens
IEMINNSTLLPGVK

SEQ ID NO: 437 - protein, 14 aa, Homo sapiens
FLSKFNCSRETVEF

SEQ ID NO: 438 - protein, 14 aa, Homo sapiens
IEVRINRTLKKIIL

SEQ ID NO: 439 - protein, 14 aa, Homo sapiens
WIASDNWSTATKIT

SEQ ID NO: 440 - protein, 14 aa, Homo sapiens
AFRRGNISSFHSFL

SEQ ID NO: 441 - protein, 14 aa, Homo sapiens
SQCIFNHSQRTLAY

SEQ ID NO: 442 - protein, 14 aa, Homo sapiens
LGVLKNVTFTDGWN

SEQ ID NO: 443 - protein, 14 aa, Homo sapiens
ENHYTNQTDMPHCL

SEQ ID NO: 444 - protein, 14 aa, Homo sapiens
CLLCNNKTHWAPVR

SEQ ID NO: 445 - protein, 14 aa, Homo sapiens
EYLNWNDSLAILLL

SEQ ID NO: 446 - protein, 14 aa, Homo sapiens
PTVEVNVSLPRVII

SEQ ID NO: 447 - protein, 14 aa, Homo sapiens
DSMSGNVTMTNPSS

SEQ ID NO: 448 - protein, 14 aa, Homo sapiens
HICRENATSVSKTL

SEQ ID NO: 449 - protein, 16 aa, Homo sapiens
GHIIIGGLFAIHEKML

SEQ ID NO: 450 - protein, 16 aa, Homo sapiens
STLLPGVKLGYEIYDT

SEQ ID NO: 451 - protein, 16 aa, Homo sapiens
VKAVIGSGYSEITMAV

SEQ ID NO: 452 - protein, 16 aa, Homo sapiens
GWNWIGIITTDDDYGR

SEQ ID NO: 453 - protein, 16 aa, Homo sapiens
FAFRRGNISSFHSFLQ

SEQ ID NO: 454 - protein, 16 aa, Homo sapiens
DYAEPGLIHSIQLAVF

SEQ ID NO: 455 - protein, 16 aa, Homo sapiens
PWEVLGVLKNVTFTDG

SEQ ID NO: 456 - protein, 16 aa, Homo sapiens
FVLVVGIIFTRNLNTP

SEQ ID NO: 457 - protein, 16 aa, Homo sapiens
VKSSGGLRVCYVILLC

SEQ ID NO: 458 - protein, 16 aa, Homo sapiens
RQTMFGVSFTLCISCI

SEQ ID NO: 459 - protein, 16 aa, Homo sapiens
LECEEGSILAFGTMLG

SEQ ID NO: 460 - protein, 16 aa, Homo sapiens
SILAFGTMLGYIAILA

SEQ ID NO: 461 - protein, 16 aa, Homo sapiens
LISNYGILYCTFIPKC

SEQ ID NO: 462 - protein, 35 aa, Homo sapiens
RSQHICCYECQNCPENHYTNQTDMPHCLLCNNKTH

SEQ ID NO: 463 - protein, 13 aa, Homo sapiens
ELAMVTGKFFSFF

SEQ ID NO: 464 - protein, 8 aa, bacteriophage T7
DYKDDDDK

SEQ ID NO: 465 - DNA, 733 bp, homo sapiens
gggatccggagcccaaatcttctgacaaaactcacacatgcccaccgtgcccagcacctgaattcgagggtgcaccgtcagtcttcctcttccccccaaaacccaaggacaccctcatgatctcccggactcctgaggtcacatgcgtggtggtggacgtaagccacgaagaccctgaggtcaagttcaactggtacgtggacggcgtggaggtgcataatgccaagacaaagccgcgggaggagcagtacaacagcacgtaccgtgtggtcagcgtcctcaccgtcctgcaccaggactggctgaatggcaaggagtacaagtgcaaggtctccaacaaagccctcccaacccccatcgagaaaaccatctccaaagccaaagggcagccccgagaaccacaggtgtacaccctgcccccatcccgggatgagctgaccaagaaccaggtcagcctgacctgcctggtcaaaggcttctatccaagcgacatcgccgtggagtgggagagcaatgggcagccggagaacaactacaagaccacgcctcccgtgctggactccgacggctccttcttcctctacagcaagctcaccgtggacaagagcaggtggcagcaggggaacgtcttctcatgctccgtgatgcatgaggctctgcacaaccactacacgcagaagagcctctccctgtctccgggtaaatgagtgcgacggccgcgactctagaggat

SEQ ID NO: 466 - DNA, 19 bp, Homo sapiens
acccagaggtgtgcatcca

SEQ ID NO: 467 - DNA, 23 bp, Homo sapiens
gagtgtgcattcggtagaaagga

SEQ ID NO: 468 - DNA, 25 bp, Homo sapiens
tcctgtgcagacgtgtgtacccctg

SEQ ID NO: 469 - DNA, 22 bp, Homo sapiens
tgctcctggaagggctgcacct

SEQ ID NO: 470 - DNA, 20 bp, Homo sapiens
aggttcctgacggtgaggaa

SEQ ID NO: 471 - DNA, 22 bp, Homo sapiens
tgctcctggaagggctgcacct
